(19) United States
(12) Patent Application Publication
(10) Pub. No.: US 2025/0011402 A1
(43) Pub. Date: Jan. 9, 2025

(54) ANTIBODIES AGAINST DISEASE CAUSING AGENTS OF POULTRY AND USES THEREOF

(71) Applicant: NOVOBIND LIVESTOCK THERAPEUTICS INC., Vancouver (CA)

(72) Inventors: Hamlet ABNOUSI, Vancouver (CA); Slade Andrew LOUTET, Vancouver (CA); Filip VAN PETEGEM, Vancouver (CA); Tsz Ying Silvia CHEUNG, Vancouver (CA)

(73) Assignee: NOVOBIND LIVESTOCK THERAPEUTICS INC., Vancouver (CA)

(21) Appl. No.: 18/777,457

(22) Filed: Jul. 18, 2024

Related U.S. Application Data
(63) Continuation-in-part of application No. 17/141,052, filed on Jan. 4, 2021.
Application No. 17/141,052 is a continuation of application No. PCT/IB2019/001198, filed on Jul. 3, 2019.
(60) Provisional application No. 62/694,164, filed on Jul. 5, 2018.
(60) Provisional application No. 63/534,432, filed on Aug. 24, 2023.

(51) Int. Cl. C07K 16/12; A61K 39/00; A61K 45/06; A61P 31/04

(52) U.S. Cl. CPC C07K 16/1282; A61K 45/06; A61P 31/04; A61K 2039/505; C07K 2317/565; C07K 2317/569; C07K 2317/76

(57) ABSTRACT

Described are methods and antibodies useful for reducing, eliminating, or preventing infection with a bacterial population in an animal. Also described herein are antigens useful for targeting by heavy chain antibodies and VHH fragments for reducing a bacterial population in an animal.

### REFERENCE TO RELATED APPLICATIONS

[0001] This application is a continuation-in-part patent application of U.S. patent application Ser. No. 17/141,052, filed on Jan. 4, 2021 claiming benefit to and priority to United States Provisional Application Ser. No. 62/694,164, filed on Jul. 5, 2018, and to International Patent Application No. PCT/IB2019/001198, filed on Jul. 3, 2019, each of which are hereby incorporated by this reference in their entireties.

### REFERENCE TO ELECTRONIC SEQUENCE LISTING

[0002] The application contains a Sequence Listing which has been submitted electronically in .XML format and is hereby incorporated by reference in its entirety. Said .XML copy, created on Sep. 12, 2024, is named “068964.001USCIP.xml” and is 2,292,563 bytes in size. The sequence listing contained in this .XML file is part of the specification and is hereby incorporated by reference herein in its entirety.

### FIELD OF THE INVENTION

[0003] This invention relates to methods and compositions for the control of microorganisms associated with necrotic enteritis and uses thereof.

### BACKGROUND OF THE INVENTION

[0004] Losses to the agriculture industry following contamination of livestock with pathogens are a global burden. With a growing global population and no significant increase in the amount of farmland available to agriculture, there is a need to produce larger quantities of food without using more space. Traditional treatment of animals with antibiotics is a major contributor to the emergence of multi-drug resistant organisms and is widely recognised as an unsustainable solution to controlling contamination of livestock. There is a need for the development of pathogen-specific molecules that inhibit infection or association of the pathogen with the host, without encouraging resistance. Global losses to the poultry industry due to the pathogenic organisms that cause necrotic enteritis has been estimated to be $6 billion⁽¹⁾ USD per annum. The bacterium Clostridium perfringens is the causative agent of necrotic enteritis in poultry in conjunction with a variety of predisposing factors⁽²⁾.

### SUMMARY OF THE INVENTION

[0005] With reference to the definitions set out below, described herein are polypeptides comprising heavy chain variable region fragments (V_{H}Hs) whose intended use includes but is not limited to the following applications in agriculture or an unrelated field: diagnostics, in vitro assays, feed, therapeutics, substrate identification, nutritional supplementation, bioscientific and medical research, and companion diagnostics. Also described herein are polypeptides comprising V_{H}Hs that bind and decrease the virulence of disease-causing agents in agriculture. Further to these descriptions, set out below are the uses of polypeptides that comprise V_{H}Hs in methods of reducing transmission and severity of disease in host animals, including their use as an ingredient in a product. Further described are the means to produce, characterise, refine, and modify V_{H}Hs for this purpose.

[0006] In accordance with the purpose(s) of this invention, as embodied and broadly described herein, this invention, in one aspect, relates to a polypeptide comprising at least one variable region fragment of a heavy chain antibody (V_{H}H) having an amino acid sequence at least 99% identical to any one of SEQ ID NOs: 1 to 56 or 212 to 340 or 695 to 968 or 1791 to 1795, wherein the polypeptide is capable of a) reducing the cytotoxicity of NetB with an IC50 value less than 1 mM by at least 90%; b) reducing the binding of CnaA to collagen by greater than 50% at 2 uM; or c) reducing Cpa lecithinase activity by greater than 40% at 1 uM.

[0007] In one embodiment, the V_{H}H comprises: a complementarity determining region 1 (CDR1) as set forth in any one of SEQ ID NOs: 57 to 106 or 341 to 458 or 969 to 1242 or 1796 to 1800, a complementarity determining region 2 (CDR2) as set forth in any one of SEQ ID NOs: 107 to 156 or 459 to 576 or 1243 to 1516 or 1801 to 1805, and a complementarity determining region 3 (CDR3) as set forth in any one of SEQ ID NOs: 157 to 206 or 577 to 694 or 1517 to 1790 or 1806 to 1810.

[0008] In another embodiment, the polypeptide comprises a plurality of V_{H}Hs. In some embodiments, the plurality of V_{H}Hs is identical to another V_{H}H of the plurality of V_{H}Hs. In other embodiments, the plurality of V_{H}Hs comprises at least three V_{H}Hs. In additional embodiments, the plurality of V_{H}Hs are covalently coupled to one another by a linker, the linker comprising one or more amino acids.

[0009] In another aspect, the invention relates to a polypeptide complex comprising the polypeptides as disclosed herein, wherein the polypeptide complex comprises: a first component polypeptide, and a second component polypeptide, wherein the first component polypeptide and the second component polypeptide are not covalently linked together and are coupled together by a protein-protein interaction, a small molecule-protein interaction, or a small molecule-small molecule interaction, and wherein each of the first and the second component polypeptides comprise a V_{H}H which specifically binds a pathogen.

[0010] In one embodiment, the pathogen is a poultry-associated bacterium. In particular embodiments, wherein the poultry-associated bacterium comprises a species of Clostridium. And in other embodiments, the species of Clostridium is Clostridium perfringens.

[0011] In other embodiments, the V_{H}H specifically binds a Clostridium virulence factor, wherein the Clostridium virulence factor is NetB polypeptide, NetB-like toxin polypeptide, Cpa polypeptide, Cpa-like toxin polypeptide, Cpb2 polypeptide, Cpb2-like toxin polypeptide, CnaA polypeptide, CnaA-like polypeptide, CnaA collagen binding domain polypeptide, or CnaA collagen binding domain-like polypeptide. In particular embodiments, the V_{H}H specifically binds an antigen or polypeptide at least 99% identical to SEQ ID NOs: 207, 208, 209, 210, 211 or combinations thereof.

[0012] In additional embodiments, the polypeptides disclosed herein further comprise a vitamin, an antibiotic, a hormone, an antimicrobial peptide, a steroid, a probiotic, a probiotic, a bacteriophage, chitin, chitosan, B-1,3-glucan, vegetable extracts, peptone, shrimp meal, krill, algae, B-cyclodextran, alginate, gum, tragacanth, pectin, gelatin, an additive spray, a toxin binder, a short chain fatty acid, a medium chain fatty acid, yeast, a yeast extract, sugar, a digestive enzyme, a digestive compound, an essential mineral, an essential salt, or fiber.

[0013] In other aspects, the invention relates to a vector or a cell comprising a nucleic acid or a plurality of nucleic acids encoding the polypeptide disclosed herein, wherein the polypeptide is produced by incubating the cell in a medium suitable for secretion of the polypeptide from the cell and purifying the polypeptide from the medium. In one embodiment, the cell is a yeast selected from the genus Pichia or Saccharomyces, or a bacterial cells selected from the genus Escherichia or a probiotic bacterium, wherein the probiotic bacteria is selected from the group consisting of the genus Bacillus, the genus Lactobacillus, the genus Bifidobacterium.

[0014] In yet another aspect, the invention relates to a method of of reducing the activity of a Clostridium perfringens virulence factor comprising administering to a poultry animal, a non-poultry animal species, or human individual a polypeptide at least 99% identical to SEQ IDs Nos: 207, 208, 209, 210, 211, or combinations thereof, wherein the method reduces or prevents a poultry-associated bacterial infection or reduces transmission or prevents transmission of the poultry-associated bacterial from the poultry species to another poultry animal, another animal species, or human individual.

[0015] In one embodiment, the poultry animal is a species of a chicken, turkey, duck, quail, pigeon, squab, ostrich, or goose and the non-poultry animal species is a pig, sheep, goat, horse, cow, llama, alpaca, mink, rabbit, dog, cat, or human.

[0016] In another embodiment, the polypeptide is adapted for introduction to the alimentary canal orally or rectally, provided to the exterior surface (for example, as a spray or submersion), provided to the medium in which the animal dwells (including air based media), provided by injection, provided intravenously, provided via the respiratory system, provided via diffusion, provided via absorption by the endothelium or epithelium, or provided via a secondary organism such as a yeast, bacterium, algae, bacteriophages, plants and insects to a host.

[0017] In one another embodiment, the polypeptides of SEQ ID NOs: 210 or 211 can outcompete Clostridium perfringens surface-expressed CnaA binding to collagen by 10%, 20%, 30%, 40%, 50%, 60%, 70%, 80%, 90%, 95%, 99%, or 100%.

[0018] Additional advantages of the invention will be set forth in part in the description which follows, and in part will be obvious from the description, or may be learned by practice of the invention. The advantages of the invention will be realized and attained by means of the elements and combinations particularly pointed out in the appended claims. It is to be understood that both the foregoing general description and the following detailed description are exemplary and explanatory only and are not restrictive of the invention, as claimed.

### INCORPORATION BY REFERENCE

[0019] All publications, patents, and patent applications mentioned in this specification are herein incorporated by reference to the same extent as if each individual publication, patent, or patent application was specifically and individually indicated to be incorporated by reference.

### BRIEF DESCRIPTIONS OF THE DRAWINGS

[0020] The accompanying drawings, which are incorporated in and constitute a part of this specification, illustrate (one) several embodiment(s) of the invention and together with the description, serve to explain the principles of the invention.

[0021] The novel features of the invention are set forth with particularity in the appended claims. A better understanding of the features and advantages of the present invention will be obtained by reference to the following detailed description that sets forth illustrative embodiments, in which the principles of the invention are utilized, and the accompanying drawings of which:

[0022] FIG. 1A shows a schematic of camelid heavy chain only antibodies and their relationship to V_{H}H domains. FIG. 1B illustrates the framework regions (FRs) and complementarity determining regions (CDRs) of the V_{H}H domain.

[0023] FIGS. 2A-20 show phage ELISA binding data for V_{H}H antibodies of this disclosure.

[0024] FIG. 3 shows that unlabeled CnaA can outcompete labeled CnaA for collagen binding.

[0025] FIG. 4A shows the inhibition of NetB cytotoxicity by four VHH antibodies of this disclosure. FIG. 4B shows the inhibition of CnaA binding to collagen by two V_{H}H antibodies of this disclosure. FIG. 4C shows the stability of six V_{H}H antibodies of this disclosure in a chicken jejunal extract.

### DETAILED DESCRIPTION

[0026] The present invention may be understood more readily by reference to the following detailed description of preferred embodiments of the invention and the Examples included therein and to the Figures and their previous and following description.

### I. Definitions

[0027] To facilitate an understanding of the principles and features of the various embodiments of the disclosure, various illustrative embodiments are explained herein. Although exemplary embodiments of the disclosure are explained in detail, it is to be understood that other embodiments are contemplated. Accordingly, it is not intended that the disclosure is limited in its scope to the details of construction and arrangement of components set forth in the description or examples. The disclosure is capable of other embodiments and of being practiced or carried out in various ways.

[0028] In describing the present invention, the following terminology is used in accordance with the definitions below.

[0029] In the following description, certain specific details are set forth in order to provide a thorough understanding of various embodiments. However, one skilled in the art will understand that the embodiments provided may be practiced without these details. Unless the context requires otherwise, throughout the specification and claims which follow, the word “comprise” and variations thereof, such as, “comprises” and “comprising” are to be construed in an open, inclusive sense, that is, as “including, but not limited to.” As used in this specification and the appended claims, the singular forms “a,” “an,” and “the” include plural referents unless the content clearly dictates otherwise. It should also be noted that the term “or” is generally employed in its sense including “and/or” unless the content clearly dictates otherwise. Further, headings provided herein are for convenience only and do not interpret the scope or meaning of the claimed embodiments.

### A. Host

[0030] As referred to herein, “host”, “host organism”, “recipient animal”, “host animal” and variations thereof refer to the intended recipient of the product when the product constitutes a feed. In certain embodiments, the host is from the superorder Galloanserae. In certain embodiments, the host is a poultry animal. In certain embodiments, the poultry animal is a chicken, turkey, duck, quail, pigeon, squab or goose. In certain embodiments, the poultry animal is a chicken.

### B. Pathogens

[0031] As referred to herein, “pathogen”, “pathogenic”, and variations thereof refer to virulent microorganisms, that can be associated with host organisms, that give rise to a symptom or set of symptoms in that organism that are not present in uninfected host organisms, including the reduction in ability to survive, thrive, reproduce. Without limitation, pathogens encompass parasites, bacteria, viruses, prions, protists, fungi, and algae. In certain embodiments, the pathogen is a bacterium belonging to the Clostridium genus.

[0032] “Virulence”, “virulent” and variations thereof refer to a pathogen's ability to cause symptoms in a host organism. “Virulence factor” refers to nucleic acids, plasmids, genomic islands, genes, peptides, proteins, toxins, lipids, macromolecular machineries, or complexes thereof that have a demonstrated or putative role in infection.

[0033] “Disease-causing agent” refers to a microorganism, pathogen, or virulence factor with a demonstrated or putative role in infection.

### C. Bacteria

[0034] As referred to herein, “bacteria”, “bacterial” and variations thereof refer, without limitation, to Clostridium species, or any other bacterial species associated with host organisms. In certain embodiments, bacteria may not be virulent in all host organisms it is associated with.

### D. Antibodies

[0035] A schematic of camelid heavy chain only antibodies and their relationship to V_{H}H domains and complementarity determining regions (CDRs) is shown in FIG. 1. (Panel A). A camelid heavy chain only antibody consists of two heavy chains linked by a disulphide bridge. Each heavy chain contains two constant immunoglobulin domains (CH2 and CH3) linked through a hinge region to a variable immunoglobulin domain (V_{H}H). (Panel B) are derived from single V_{H}H domains. Each V_{H}H domain contains an amino acid sequence of approximately 110-130 amino acids. The V_{H}H domain consists of the following regions starting at the N-terminus (N): framework region 1 (FR1), complementarity-determining region 1 (CDR1), framework region 2 (FR2), complementarity-determining region 2 (CDR2), framework region 3 (FR3), complementarity-determining region 3 (CDR3), and framework region 4 (FR4). The domain ends at the C-terminus (C). The complementarity-determining regions are highly variable, determine antigen binding by the antibody, and are held together in a scaffold by the framework regions of the V_{H}H domain. The framework regions consist of more conserved amino acid sequences; however, some variability exists in these regions.

[0036] As referred to herein “VHH” refers to an antibody or antibody fragment comprising a single heavy chain variable region which may be derived from natural or synthetic sources. NBXs referred to herein are an example of a VHH. In a certain aspect a V_{H}H may lack a portion of a heavy chain constant region (CH2 or CH3), or an entire heavy chain constant region. As referred to herein, NBXs are a V_{H}H that binds NETB.

[0037] As referred to herein “heavy chain antibody” refers to an antibody that comprises two heavy chains and lacks the two light chains normally found in a conventional antibody. The heavy chain antibody may originate from a species of the Camelidae family or Chondrichthyes class. Heavy chain antibodies retain specific binding to an antigen in the absence of any light chain.

[0038] As referred to herein “specific binding”, “specifically binds” or variations thereof refer to binding that occurs between an antibody and its target molecule that is mediated by at least one complementarity determining region (CDR) of the antibody's variable region. Binding that is between the constant region and another molecule, such as Protein A or G, for example, does not constitute specific binding.

[0039] As referred to herein “antibody fragment” refers to any portion of a conventional or heavy chain antibody that retains a capacity to specifically bind a target antigen and may include a single chain antibody, a variable region fragment of a heavy chain antibody, a nanobody, a polypeptide or an immunoglobulin new antigen receptor (IgNAR).

[0040] As referred to herein an “antibody originates from a species” when any of the CDR regions of the antibody were raised in an animal of said species. Antibodies that are raised in a certain species and then optimized by an in vitro method (e.g., phage display) are considered to have originated from that species.

[0041] As referred to herein “conventional antibody” refers to any full-sized immunoglobulin that comprises two heavy chain molecules and two light chain molecules joined together by a disulfide bond. In certain embodiments, the antibodies, compositions, feeds, products, and methods described herein do not utilize conventional antibodies.

### E. Production System

[0042] As referred to herein, “production system” and variations thereof refer to any system that can be used to produce any physical embodiment of the invention or modified forms of the invention. Without limitation, this includes but is not limited to biological production by any of the following: bacteria, yeast, algae, arthropods, arthropod cells, annelids, plants, mammalian cells. Without limitation, biological production can give rise to antibodies that can be intracellular, periplasmic, membrane-associated, secreted, or phage-associated. Without limitation, “production system” and variations thereof also include, without limitation, any synthetic production system. This includes, without limitation, de novo protein synthesis, protein synthesis in the presence of cell extracts, protein synthesis in the presence of purified enzymes, and any other alternative protein synthesis system.

### F. Product

[0043] As referred to herein, “product” refers to any physical embodiment of the invention or modified forms of the invention, wherein the binding of the V_{H}H to any molecule, including itself, defines its use. Without limitation, this includes a feed, a feed additive, a nutritional supplement, a premix, a medicine, a therapeutic, a drug, a diagnostic tool, a component or entirety of an in vitro assay, a component or the entirety of a diagnostic assay (including companion diagnostic assays).

### G. Feed Product

[0044] As referred to herein, “feed product” refers to any physical embodiment of the invention or modified forms of the invention, wherein the binding of the VHH to any molecule, including itself, defines its intended use as a product that is taken up by a host organism. Without limitation, this includes a feed, a pellet, a feed additive, a nutritional supplement, a premix, a medicine, a therapeutic or a drug.

### II. Detailed Description of the Invention

[0045] Descriptions of the invention provided are to be interpreted in conjunction with the definitions and caveats provided herein.

[0046] For many years, the agriculture industry has utilized antibiotics to control pathogenic bacteria. These antibiotics also acted as growth promoters. This approach has contributed greatly to the spread of antibiotic resistance amongst pathogenic organisms. To phase out antibiotics for non-medicinal purposes and limit antimicrobial resistance, the use of antibiotics as growth promoters in animal feed has already been banned in Europe (effective from 2006). Widespread protection of farmed animals through vaccination has failed due to the short lifespan of many agriculturally important animals, logistical challenges with vaccination of industrial-sized flocks, and high costs. The withdrawal of prophylactic antibiotics in animal feed and the failure of vaccination to offer widespread protection underpins the need for the development of non-antibiotic products to administer to agricultural animals to prevent infection and promote growth.

[0047] Significant pathogens affecting poultry animals include bacteria, such as members of the Clostridium and Salmonella genera, among others, as well as parasites, such as members of the Eimeria genus.

[0048] Losses due to Clostridium perfringens, the causative agent of necrotic enteritis are estimated at $6 billion⁽¹⁾ USD per annum. Necrotic enteritis can lead to significant mortality in chicken flocks⁽³⁾. At subclinical levels, damage to the intestinal mucosa caused by C. perfringens leads to decreased digestion and absorption, reduced weight gain and increased feed conversion ratio⁽³⁾. Typically, necrotic enteritis occurs after some other predisposing factor causes mucosal damage to the chicken⁽²⁾ C. perfringens virulence factors associated with necrotic enteritis have been shown to include production of toxins and adherence to collagen⁽⁴⁾.

[0049] Subclinical infection by Eimeria parasites is one of the most common predisposing factors for necrotic enteritis⁽²⁾. These parasites can physically damage the epithelial layer and induce mucose generation⁽⁵⁾. In addition, Eimeria parasites are also the causative agent of coccidiosis in chickens, a disease that is estimated to cause €10 billion in poultry losses globally⁽⁶⁾. Coccidiosis is characterized by reduced weight gain and feed conversion, malabsorption, cell lysis of cells linking, and diarrhea⁽⁷⁾.

[0050] Changes to the gastrointestinal tract microbiota can also serve to induce necrotic enteritis. For example, early infections early of chicks by Salmonella enterica can result in the development of necrotic enteritis in experimental models, possibly through alteration of the host immune response⁽⁸⁾.

[0051] Other proposed predisposing factors for the development of necrotic enteritis include immune suppression by viral infections, physical changes to the gut caused by alterations to the diet, and poor animal husbandry⁽²⁾.

[0052] Earlier efforts in the field of this invention rely on the host organism to generate protection against disease-causing agents. This approach is often limited by the short lifespan of the host organisms affected by the pathogens listed above, which do allow the host organism's immune system enough time to generate long-lasting immunity. Furthermore, the effectiveness of prior arts is limited by technical challenges associated with widespread vaccination of large flocks of host organisms. These problems are circumvented by introducing exogenous peptides that neutralise the virulence and spread of the disease-causing agent into the host via feed without eliciting the host immune response. Moreover, the methods described herein provide scope for the adaptation and refinement of neutralising peptides, which provides synthetic functionality beyond what the host is naturally able to produce.

[0053] Antibody heavy chain variable region fragments (V_{H}Hs) are small (12-15 kDa) proteins that comprise specific binding regions to antigens. When introduced into an animal, V_{H}Hs bind and neutralise the effect of disease-causing agents in situ. Owing to their smaller mass, they are less susceptible than conventional antibodies, such as previously documented IgYs, to cleavage by enzymes found in host organisms, more resilient to temperature and pH changes, more soluble, have low systemic absorption and are easier to recombinantly produce on a large scale, making them more suitable for use in animal therapeutics than conventional antibodies.

### A. Antibodies for Preventing or Reducing Virulence (Summary)

[0054] In one aspect, the present invention provides a polypeptide or pluralities thereof comprising a V_{H}H or V_{H}Hs that bind disease-causing agents to reduce the severity and transmission of disease between and across species. In certain embodiments, the V_{H}H is supplied to host animals. In certain embodiments, the VHH is an ingredient of a product.

### 1. Binding to Reduce Virulence

[0055] In another aspect, the present invention provides a polypeptide or pluralities thereof comprising a V_{H}H or V_{H}Hs that bind disease-causing agents, and in doing so, reduce the ability of the disease-causing agent to exert a pathological function or contribute to a disease phenotype. In certain embodiments, binding of the VHH(s) to the disease-causing agent reduces the rate of replication of the disease-causing agent. In certain embodiments, binding of the VHH(s) to the disease-causing agent reduces the ability of the disease-causing agent to bind to its cognate receptor. In certain embodiments, binding of the VHH(s) to the disease-causing agent reduces the ability of the disease-causing agent to interact with another molecule or molecules. In certain embodiments, binding of the VHH(s) to the disease-causing agent reduces the mobility or motility of the disease-causing agent. In certain embodiments, binding of the VHH(s) to the disease-causing agent reduces the ability of the disease-causing agent to reach the site of infection. In certain embodiments, binding of the VHH(s) to the disease-causing agent reduces the ability of the disease-causing agent to cause cell death.

2. Antibodies Derived from Llamas

[0056] In a further aspect, the present invention provides a method for the inoculation of Camelid or other species with recombinant virulence factors, the retrieval of mRNA encoding V_{H}H domains from lymphocytes of the inoculated organism, the reverse transcription of mRNA encoding V_{H}H domains to produce cDNA, the cloning of cDNA into a suitable vector and the recombinant expression of the V_{H}H from the vector. In certain embodiments, the camelid can be a dromedary, camel, llama, alpaca, vicuna or guacano, without limitation. In certain embodiments, the inoculated species can be, without limitation, any organism that can produce single domain antibodies, including cartilaginous fish, such as a member of the Chondrichthyes class of organisms, which includes for example sharks, rays, skates, and sawfish. In certain embodiments, the heavy chain antibody comprises a sequence set forth in Table 1. In certain embodiments, the heavy chain antibody comprises an amino acid sequence with at least 80%, 90%, 95%, 97%, or 99% identity to any sequence disclosed in Table 1. In certain embodiments, the heavy chain antibody possess a CDR1 set forth in Table 2. In certain embodiments, the heavy chain antibody possess a CDR2 set forth in Table 2. In certain embodiments, the heavy chain antibody possess a CDR3 set forth in Table 2.

TABLE 1
Unique SEQ ID NOs for V_{H}H antibodies
of this disclosure

| SEQ | | | |
|---|---|---|---|
| ID | | | Anti- |
| NO: | NBX | Amino acid sequence | gen |
| 1 | NBX0301 | QVQLQESGGGVVQAGGSLSLSCSPY | NetB |
| | | QRASSLFAMGWFRQSPGKEREFVAG | |
| | | ISWNGDKSQYADSVKDRFTISRDND | |
| | | KNTVFLQMNSLKPEDTAVYYCAAHR | |
| | | ASFELGFATHDYDFWGQGTQVTVSS | |
| 2 | NBX0302 | QVQLQESGGGLVQTGGSLRLSCVAS | NetB |
| | | GSIFSISSAVWSRQAPGKQREWVAS | |
| | | IFSDGSTNYATSVKGRFTISRDHAK | |
| | | NTVYLQMNSLKPEDTGVYYCAVDGY | |
| | | RGQGTQVTVSS | |
| 3 | NBX0303 | QVQLQESGGGLVQAGGSLRLSCTAS | NetB |
| | | GRTLSYWTMGWFRQAPGKEREFVAA | |
| | | INWSSGTRYSDSVRDRFTIDGDTDK | |
| | | TTVYLEMNKMNLDDSAVYYCAAHRA | |
| | | SFGLGYQTHEYDFWGQGTQVTVSS | |
| 4 | NBX0304 | QVQLQESGGGLVQTGDSLRLSCTAS | NetB |
| | | GGTFSSYTMGWYRQAPGKGREFVGS | |
| | | ITWNSEVTYYADSVKGRFTISRDNA | |
| | | KNMMNLQMNSLKPEDTAVYYCAAGR | |
| | | AGSGFTSWGQGTQVTVSS | |
| 5 | NBX0305 | QVQLQESGGGLVQPGGSLRLSCTAS | NetB |
| | | GFTLDKYAVGWFRQAPGKEREGVSC | |
| | | ISSIDDSTDYVDSVKGRFTISRDNA | |
| | | KNAVYLQMNSLKPEDTAVYNCMTIP | |
| | | LPYGSTCDIPSRSDLLAINYWGKGT | |
| | | LVTVSS | |
| 6 | NBX0306 | QVQLQQSGGGLVQPGGSLRLSCTAS | NetB |
| | | GFTVPYYYIGWFRQAPGKEREGISC | |
| | | IASSSGKAYYADSVKGRFTLSKDNA | |
| | | KNTAYLQMDSLKPEDTAVYYCAALR | |
| | | KYGSTCYLHVLEYDYWGQGTQVNVS | |
| | | S | |
| 7 | NBX0307 | QVQLQESGGGLVQAGGSLRLSCTAS | NetB |
| | | GRTLSYWTMGWFRQVPGKEREFVAA | |
| | | INWSSGTRYSESVRDRFTIDGDTDK | |
| | | TTVYLEMNKMNLDDSAVYYCAAHRA | |
| | | SFGLGYQTHEYDFWGQGTQVTVSS | |
| 8 | NBX0308 | QVQLQQSGGGLVQAGGSLRLSCTAS | NetB |
| | | GRTLSYWTMGWFRQVPGKEREFVAA | |
| | | INWSSGTRYSESVRDRFTIDGDTDK | |
| | | TTVYLEMNKMNLDDSAVYYCAAHRA | |
| | | SFGLGYQTHEYDFWGQGTQVTVSS | |
| 9 | NBX0309 | QVQLQQSGGGLVQAGGSLRLSCAAS | NetB |
| | | GSTFNNYMIGWFRQAPGKEREFVAT | |
| | | ISGSGAGTFYADSVRGRFTISRDNA | |
| | | KNTVYLQMNSLKLEDTAGYYCARRM | |
| | | SRSGIFGLRDYDSWGQGTQVTVSS | |
| 10 | NBX0310 | QVQLQQSGGGVVQAGGSLSLSCSPY | NetB |
| | | QRASSLFAMGWFRQSPGKEREFVAG | |
| | | ISWNGDKSQYADSVKDRFTISRDND | |
| | | KNTVFLQMNSLKPEDTAVYYCAAHR | |
| | | ASFELGFATHDYDFWGQGTQVTVSS | |
| 11 | NBX0311 | QVQLQESGGGLVQAGGSLRLSCAAS | NetB |
| | | GRTFSNADMAWFRQSPGKERESVAA | |
| | | ISWSGGRTYYADSVKGRATISRDIA | |
| | | KDTVYLQMNSLKPEDTAVYYCAAGG | |
| | | YSNLPTSYGYWGQGTQVTVSS | |
| 12 | NBX0316 | QVQLQESGGGLVQTGGSLRLSCAAS | CnaA |
| | | GRAFSTYGMGWFRQAPGKEREFVAG | |
| | | ISSSGAGSAYVDSVKHRFTVSRDNA | |
| | | KNTMYLQMNSLKPEDTAVYYCAAST | |
| | | TSWGKFAHYIYWGQGTQVTVSS | |
| 13 | NBX0317 | QVQLQESGGGLVQAGGSLRLSCAAS | CnaA |
| | | GGTFSSYIMGWFRQAPGKDREFVGA | |
| | | ISWSGGVTHYADSVKGRFTISRDNA | |
| | | KNTVYLQMNSLKPEDTAVYYCAADS | |
| | | RISAGGSYYEADFGSWGQGTQVTVS | |
| | | S | |
| 14 | NBX0318 | QVQLQESGGGLVQAGGSLRLSCVVS | NetB |
| | | GSIMSIRVMGWYRQAPGKQRELVAT | |
| | | MSRGNTINYADSVRGRFTISRDNAK | |
| | | STVYLQMNSLKPEDTDVYYCAALLD | |
| | | SYYWGQGTQVTVSS | |
| 15 | NBX0319 | QVQLQESGGGLVQAGGSLRLSCAAS | NetB |
| | | ASIISIRVMGWYRQAPGKQRELVAT | |
| | | MSRGGTINYADSVRGRFTISRDNAK | |
| | | STVFLEMNSLKPEDTAVYYCTALLD | |
| | | SYYWGQGTQVTVSS | |
| 16 | NBX0320 | QVQLQESGGGLVQAGGSLRLSCAAS | NetB |
| | | GSIFSIRVMGWYRQAPGKQRELVAT | |
| | | MSRGGTINYADSVRGRFTISRDNAK | |
| | | ITVYLQMTSLKPEDTAVYYCAALLD | |
| | | SYYWGQGTQVTVSS | |
| 17 | NBX0321 | QVQLQESGGGLVQPGGSLRLSCTAS | NetB |
| | | GFTLDKYAVGWFRQAPGKEREGVSC | |
| | | ISSIDDSTDYVDSVKGRFTISRDNA | |
| | | KNAVYLQMNSLKPEDTAVYDCMTIP | |
| | | LPYGSTCRIPSRSDLLAINYWGKGT | |
| | | LVTVSS | |
| 18 | NBX0322 | QVQLQESGGGLVQAGGSLRLSCQGS | NetB |
| | | GRTFSTYAMGWYRQAPGKEREFVAA | |
| | | ITRGGNTIYADSVKGRFTISRVSDK | |
| | | NTVYLQMSSLKPEDTAVYYCAADRI | |
| | | IVPRDPMDYWGKGTLVTVSS | |
| 19 | NBX0323 | QVQLQQSGGGLVQAGGSLRLSCTAS | NetB |
| | | GRTLSYWTMGWFRQAPGKEREFVAA | |
| | | INWSSGTRYSDSVRDRFTIDGDTDK | |
| | | TTVYLEMNKMNLDDSAVYYCAAHRA | |
| | | SFGLGYQTHEYDFWGQGTQVTVSS | |
| 20 | NBX0324 | QVQLQESGGGLVQAGGSLRLTCTAS | NetB |
| | | GRTLSYWTMGWFRQAPGKEREFVAA | |
| | | INWSSGTRYSDSVKDRFTIDGDSDK | |
| | | TTVYLQMNSLNLDDSAVYYCAAHRA | |
| | | SFGLGYQTHEYDFWGQGTQVTVSS | |
| 21 | NBX0325 | QVQLQESGGGLVQAGDSLRLSCLAS | CnaA |
| | | GGTFSSYIMGWFRQAPGKDREFVGA | |
| | | ISWSGGVTHYADSVKGRFTISRDNA | |
| | | KNTVYLQMNSLKPEDTAVYYCAADS | |
| | | RISAGGSYYEADFGSWGQGTQVTVS | |
| | | S | |
| 22 | NBX0326 | QVQLQESGGGLVQAGGSLRLTCAVS | CnaA |
| | | GRTFSAIHMGWFRQAPGKEREFVAG | |
| | | ISWSGGGTAYGGTVKGRFTISRDNA | |
| | | KNTVSLQMNSLKSEDTAVYYCAASD | |
| | | TDWGRSASYDYWGQGTQVTVSA | |
| 23 | NBX0327 | QVQLQQSGGGLVQAGGSLRLSCAAS | CnaA |
| | | GGTFSSYVMGWFRQAPGKDREFVGA | |
| | | ISWSGGVTHYADSVKGRFTISRDNA | |
| | | KNTVYLQMNSLKPEDTAVYYCAADS | |
| | | RISAGGSYYEADFGSWGQGTQVTVS | |
| | | S | |
| 24 | NBX0328 | QVQLQQSGGGLVQAGDSLRLSCATS | Cpa |
| | | GRTFSSYTMGWFRQTPGKEREFVAA | |
| | | ISWSGTYYTDSVKGRFTISRDTAKN | |
| | | TVYLQMNSLKPEDTAVYYCAVGSRR | |
| | | LYYSSDINYWGQGTQVTVSS | |
| 25 | NBX0329 | QVQLQESGGGLVQAGGSLRLSCATS | Cpa |
| | | GLTVSRYTMGWFRQTPGKDREFVAA | |
| | | ISWSGTYYTDSVKGRFTISVDNAKN | |
| | | MVYLQMNSLKPEDTAVYYCAAGSRR | |
| | | LYYSNDINYWGQGTQVTVSS | |
| 26 | NBX0330 | QVQLQESGGGLVQAGGSLRLSCAAS | Cpa |
| | | SRTFSNYAMAWFRQTPGKEREFLAT | |
| | | INGDTTFTIYADSVKGRFTISRDNA | |
| | | KNTLYLQMNSLKAEDTAVYYCAARQ | |
| | | WNPTMRERDYGYWGQGTEVTVSS | |
| 27 | NBX0331 | QVQLQESGGGLVQAGGSLRLSCAAS | Cpb2 |
| | | GRVFENYFMGWFRQAPGKEREFVAA | |
| | | TNWNTATNWNTYYAAFVKARFTISR | |
| | | DKAKNTLYLQMNSLKPEDTAVYYCA | |
| | | ATGSRTYDVVDYYDYWGQGTQVTVS | |
| | | S | |
| 28 | NBX0332 | QVQLQESGGGLVQAGGSLRLSCAAS | Cpb2 |
| | | GRTFSSYSMAWFRQAPGKERESVAA | |
| | | ITYSGITTAYTDSVKGRFTIWRDNA | |
| | | KNTVYLQMNSLKPEDTAVYYCAASY | |
| | | SASRSYPFGEYDYWGQGTQVTVSS | |
| 29 | NBX0333 | QVQLQESGGGLVQAGGSLRLSCAAS | Cpb2 |
| | | GRTFSSYSMAWFRQAPGKERESVAA | |
| | | ITYSGISTAYTDSVKGRFTISRDNA | |
| | | KNTVYLYMNSLKPEDTAVYYCAASY | |
| | | SASRSYPFGEYDYWGQGTQVTVSS | |
| 30 | NBX0334 | QVQLQESGGGLVQPGGSLRLSCAAS | Cpb2 |
| | | GFTFSNSAMSWMRQAPGKAVEWVSS | |
| | | INIGGDSRRYAESVAGRFTISRDNA | |
| | | KNTLYLQMNSLKPEDTAVYYCAKGL | |
| | | ASTIRGQGTQVTVSS | |
| 31 | NBX0335 | QVQLQESGGGLVQPGGSLRLSCAAS | Cpb2 |
| | | GFTFSNSAMSWMRQAPGKGVEWVSS | |
| | | IEVGGGRRYAESVAGRFTISRDNAK | |
| | | NTLYLQMNSLKPEDTAVYYCSKGLA | |
| | | STIRGQGTQVTVSS | |
| 32 | NBX0336 | QVQLQESGGGLVQPGGSLRLSCAAS | Cpb2 |
| | | GFTFSNSAMSWMRQAPGKGVEWVSS | |
| | | IGIDGGRRYAEAVAGRFTISRDNAK | |
| | | NTLYLQMNSLKPEDTAVYYCAKGLA | |
| | | STIRGQGTQVTVSS | |
| 33 | NBX0337 | QVQLQESGGGLVQPGGSLRLSCAAS | Cpb2 |
| | | GFTFSNSAMSWMRQAPGKGVEWVSS | |
| | | IGIGGGTTRYADSVAGRFTISRDNA | |
| | | KNTLYLQMNSLKPEDTAVYYCAKGL | |
| | | ASTIRGQGTQVTVSS | |
| 34 | NBX0338 | QVQLQESGGGLVQAGDSLRLSCATS | Cpa |
| | | GRSFSSYTMGWFRQTPGKEREFVAA | |
| | | ISWSGTYYTDSVKGRFTISRDNAKN | |
| | | TVYLQMNSLKPEDTAVYYCAVGSRR | |
| | | LYYSSDINYWGQGTQVTVSS | |
| 35 | NBX0339 | QVQLQESGGGLVQAGDSLRLSCATS | Cpa |
| | | GLTVSRYTMGWFRQTPGKEREFVAA | |
| | | ISWSGTYYTDSVKGRFTISRDNAKN | |
| | | MVYLQMNSLKPEDTAVYYCAAGSRR | |
| | | LHYSSDINYWGQGTQVTVSS | |
| 36 | NBX0340 | QVQLQESGGGLVQAGESLRLSCLAA | Cpa |
| | | GRTFSTSTLGWFRQAPGLEREFVAA | |
| | | IRYTSDYTARTTDYADSVKGRFAIS | |
| | | RDYIKQAVYLQMNNLKPEDTAVYYC | |
| | | AAAKYGMGYSDPSGYTYWGQGTQVT | |
| | | VSS | |
| 37 | NBX0341 | QVQLQESGGGLVQAGGSLRLSCAAS | Cpa |
| | | SRTFSNYAMAWFRQTPGKEREFLAA | |
| | | ITGDTAFTIYADSVKGRFTISRDNP | |
| | | KNTLYLQMNSLKAEDTAVYYCAARQ | |
| | | WNPTMRERDYGYWGQGTEVTVSS | |
| 38 | NBX0342 | QVQLQESGGGLVQAGGSLRLSCAAS | Cpb2 |
| | | GRRFRLYHMGWFRQAPGKEREFVAV | |
| | | ISWSGGTTVYADSVKGRFTISRDNE | |
| | | KNAGYLQMNSLKPEDTAVYYCAVDR | |
| | | LIESFSDPTAWPRMDYWGKGALVTV | |
| | | SS | |
| 39 | NBX0343 | QVQLQESGGGLVQPGGSLRLSCAAS | Cpb2 |
| | | GFTFSNSAMSWMRQAPGKGVEWVSS | |
| | | INIGGGTTSYADSVAGRFTISRDNA | |
| | | KNTLYLQMNSLKPEDTAVYYCAKGL | |
| | | ASTIRGQGTQVTVSS | |
| 40 | NBX0344 | QVQLQESGGGLVQPGGSLRLSCAAS | Cpb2 |
| | | GFTFSNSAMSWMRQAPGKGVEWVSS | |
| | | INIGGGTRRYAESVAGRFTISRDNA | |
| | | KNTLYLQMNSLKPEDTAVYYCAKGL | |
| | | ASTIRGQGTQVTVSS | |
| 41 | NBX0345 | QVQLQESGGGLVQAGGSLRLSCAAS | Cpb2 |
| | | GRKFRLYHMGWFRQAPGKEREFVAV | |
| | | ISWSGGSTVYADSVKGRFTISRDNE | |
| | | KNAGYLQMNSLKPEDTAVYYCAVDR | |
| | | LIESFSDPTAWPRMDYWGKGALVTV | |
| | | SS | |
| 42 | NBX0346 | QVQLQQSGGGLVQPGGSLRLSCAAS | Cpb2 |
| | | GFTFSNSAMSWMRQAPGKGVEWVSS | |
| | | INIGGGTRYADSVAGRFTIYRDNAK | |
| | | NTLYLQMNSLKSEDTAVYYCAKGLA | |
| | | STIRGQGTQVTVSS | |
| 43 | NBX0347 | QVQLQESGGGSVQAGGSLRLSCAAS | Cpb2 |
| | | GRTFSSYDMGWFRQAPGKEREWVAS | |
| | | ISYNIYYADFVKGRFTISKDNAKNT | |
| | | VSLQMNSLKPEDTAVYYCAAVQRRG | |
| | | SYSYDRAQSYDYWGQGTQVTVSS | |
| 44 | NBX0348 | QVQLQESGGGLVQPGGSLRLSCAAS | Cpb2 |
| | | GFTFSNSAMSWMRQAPGKGVEWVSS | |
| | | IEIGGTRRYAESVAGRFTISRDNAK | |
| | | NTLYLQMNSLKAEDTAVYYCAKGLA | |
| | | STIRGQGTQVTVSS | |
| 45 | NBX0349 | QVQLQESGGGLVQPGGSLRLSCAAS | Cpb2 |
| | | GFTFSNSPMSWMRQAPGKGVEWVSS | |
| | | INIGAGTTRYAESVAGRFTIARDNA | |
| | | KNTLYLQMNSLKPEDTAVYYCAKGL | |
| | | ASTIRGQGTQVIVSS | |
| 46 | NBX0350 | QVQLQESGGGLVQPGGSLRLSCAAS | Cpb2 |
| | | GFTFSNSAMSWMRQAPGKGVEWVSS | |
| | | INIGGGDKRYAESVAGRFTISRDNA | |
| | | KNTLYLQMNSLKFEDTAVYYCAKGL | |
| | | ASTIRGQGTQVTVSS | |
| 47 | NBX0351 | QVQLQESGGGLVQPGGSLRLSCAAS | Cpb2 |
| | | GFTFSNSAMSWMRQAPGKGVEWVSS | |
| | | IETGGTKRYAESVAGRFTISRDNAK | |
| | | NTLNLQMNSLKPEDTAVYYCAKGLA | |
| | | STIRGQGTQVTVSS | |
| 48 | NBX0352 | QVQLQQSGGGLVQPGGSLRLSCAAS | Cpb2 |
| | | GFTFSNSPMSWMRQAPGKGVEWVSS | |
| | | INIGEGTTRYAESVAGRFTISRDNV | |
| | | KNTLYLQMNSLKPEDTAVYYCAKGL | |
| | | ASTIRGQGTQVTVSS | |
| 49 | NBX0353 | QVQLQESGGGLVQPGGSLRLSCAAS | Cpb2 |
| | | GFTFSNSPMSWMRQAPGKGVEWVSS | |
| | | INIGGDTRRYAESVAGRFTISRDNA | |
| | | KNTLYLQMNSLKSEDTAVYYCAKGL | |
| | | ASTIRGQGTQVTVSS | |
| 50 | NBX0354 | QVQLQESGGGLVQPGGSLRLSCAAS | Cpb2 |
| | | GFTFSNSAMSWMRQAPGNGVEWVSS | |
| | | VNIDGGRRYAEAVAGRFTISRDNAK | |
| | | NTLYLQMNSLKPEDTAVYYCAKGLA | |
| | | STIRGQGTQVTVSS | |
| 51 | NBX0355 | QVQLQESGGGLVQPGGSLRLSCAAS | Cpb2 |
| | | GFTFSNSAMAWMRQAPGKGVEWVSS | |
| | | ISIDGGRRYAEAVAGRFTISRDNAK | |
| | | NTLYLQMNSLKPEDTAVYYCAKGLA | |
| | | STIRGQGTQVTVSS | |
| 52 | NBX0356 | QVQLQESGGGLVQAGGSLRLSCAAS | Cpb2 |
| | | GGKFTLYHMGWFRQTPGKEREFVAV | |
| | | ISWSGRSTVYADSVKGRFTISRDND | |
| | | KNAGYLQMNSLKPEDTAIYYCAVDR | |
| | | LIEKFSDPTAWPRMDSWGRGTLVTV | |
| | | SS | |
| 53 | NBX0357 | QVQLQESGGGLVQAGDSLRLSCAAS | Cpb2 |
| | | GRTASMGWFRQAPGTQREFVATITR | |
| | | SSIYTDYSDSVKGRFAISRDNAKNT | |
| | | VYLQMNSLKPEDTAVYYCAADSTMS | |
| | | GSSRYSSDYAYWGQGTQVTVSS | |
| 54 | NBX0358 | QVQLQESGGGLVQPGGSLRLSCAAS | Cpb2 |
| | | GFTFSNSPMSWMRQAPGKGVEWVSS | |
| | | IDIGGNRRYAEAVAGRFTISRDNAK | |
| | | NTLYLQMNSLKPEDTAVYYCAKGLA | |
| | | STIRGQGTQVTVSS | |
| 55 | NBX0359 | QVQLQESGGGLVQAGGSLRLSCAVS | Cpb2 |
| | | GRRFTLYHMGWFRQRPGKEREFVAV | |
| | | ISWSGGSTVYADSVKGRFTISRDNE | |
| | | KNAGYLQMNSLKPEDTAVYYCAVDR | |
| | | LIESFSDPTAWPRMDYWGKGALVTV | |
| | | SS | |
| 56 | NBX0360 | QVQLQQSGGGLVQAGGSLRLSCAAS | Cpb2 |
| | | GRRFSLYHMGWFRQAPGKEREFVAV | |
| | | ISWSGGTTVYADSVKGRFTISRDNE | |
| | | KNAGYLQMNSLKPEDTAVYYCAVDR | |
| | | LIESFSDPTAWPRMDYWGKGALVTV | |
| | | SS | |
| 212 | NBX0361 | QVQLQESGGGLVQAGGSLRLSCAAS | NetB |
| | | GSIFSIRVMGWYRQAPGKQRELVAT | |
| | | MSRGGTINYADSVRGRFTISRDNAK | |
| | | STVYLQMNSLKPEDTAVYYCAALLD | |
| | | SYYWGQGTQVTVSS | |
| 213 | NBX0362 | QVQLQESGGGLVQAGGSLRLSCVVS | NetB |
| | | GSIMSIRVMGWYRQAPGKQRELVAT | |
| | | MSRGNTINYADSVRGRFTISRDNAK | |
| | | STVFLEMNSLKPEDTAVYYCAALLD | |
| | | SYYWGQGTQVTVSS | |
| 214 | NBX0363 | QVQLQESGGGLVQAGGSLRLSCAAS | NetB |
| | | ASIISIRVMGWYRQAPGKQRELVAT | |
| | | MSRGGTINYADSVRGRFTISRDNAK | |
| | | STVYLQMNSLKPEDTDVYYCAALLD | |
| | | SYYWGQGTQVTVSS | |
| 215 | NBX0364 | QVQLQESGGGLVQAGGSLRLSCVVS | NetB |
| | | GSIMSIRVMGWYRQAPGKQRELVAT | |
| | | MSRGGTINYADSVRGRFTISRDNAK | |
| | | STVYLQMNSLKPEDTAVYYCTALLD | |
| | | SYYWGQGTQVTVSS | |
| 216 | NBX0365 | QVQLQESGGGLVQAGGSLRLSCAAS | NetB |
| | | GSIFSIRVMGWYRQAPGKQRELVAT | |
| | | MSRGGTINYADSVRGRFTISRDNAK | |
| | | STVYLQMNSLKPEDTAVYYCTALLD | |
| | | SYYWGQGTQVTVSS | |
| 217 | NBX0366 | QVQLQESGGGLVQAGGSLRLSCVVS | NetB |
| | | GSIMSIRVMGWYRQAPGKQRELVAT | |
| | | MSRGGTINYADSVRGRFTISRDNAK | |
| | | NTVYLQMTSLKPEDTAVYYCTALLD | |
| | | SYYWGQGTQVTVSS | |
| 218 | NBX0367 | QVQLQESGGGLVQAGGSLRLSCAAS | NetB |
| | | GSIFSIRVMGWYRQAPGKQRELVAT | |
| | | MSRGGTINYADSVRGRFTISRDNAK | |
| | | STVYLQMNSLKPEDTDVYYCAALLD | |
| | | SYYWGQGTQVTVSS | |
| 219 | NBX0368 | QVQLQESGGGLVQAGGSLRLSCVVS | NetB |
| | | GSIMSIRVMGWYRQAPGKQRELVAT | |
| | | MSRGNTINYADSVRGRFTISRDNAK | |
| | | NTVYLQMTSLKPEDTAVYYCAALLD | |
| | | SYYWGQGTQVTVSS | |
| 220 | NBX0369 | QVQLQESGGGLVQAGGSLRLSCAAS | NetB |
| | | ASIFSIRVMGWYRQAPGKQRELVAT | |
| | | MSRGNTINYADSVRGRFTISRDNAK | |
| | | STVYLQMTSLKPEDTAVYYCAALLD | |
| | | SYYWGQGTQVTVSS | |
| 221 | NBX0370 | QVQLQESGGGLVQAGGSLRLSCVVS | NetB |
| | | GSIMSIRVMGWYRQAPGKQRELVAT | |
| | | MSRGGTINYADSVRGRFTISRDNAK | |
| | | STVYLQMNSLKPEDTAVYYCAALLD | |
| | | SYYWGQGTQVTVSS | |
| 222 | NBX0371 | QVQLQESGGGLVQAGGSLRLSCAAS | NetB |
| | | ASIISIRVMGWYRQAPGKQRELVAT | |
| | | MSRGGTINYADSVRGRFTISRDNAK | |
| | | STVYLQMNSLKPEDTAVYYCTALLD | |
| | | SYYWGQGTQVTVSS | |
| 223 | NBX0372 | QVQLQESGGGLVQAGGSLRLSCAAS | NetB |
| | | ASIISIRVMGWYRQAPGKQRELVAT | |
| | | MSRGGTINYADSVRGRFTISRDNAK | |
| | | STVYLQMNSLKPEDTAVYYCAALLD | |
| | | SYYWGQGTQVTVSS | |
| 224 | NBX0373 | QVQLQESGGGLVQAGGSLRLSCAAS | NetB |
| | | ASIMSIRVMGWYRQAPGKQRELVAT | |
| | | MSRGNTINYADSVRGRFTISRDNAK | |
| | | STVFLEMNSLKPEDTAVYYCAALLD | |
| | | SYYWGQGTQVTVSS | |
| 225 | NBX0374 | QVQLQESGGGLVQAGGSLRLSCAAS | NetB |
| | | ASIMSIRVMGWYRQAPGKQRELVAT | |
| | | MSRGGTINYADSVRGRFTISRDNAK | |
| | | STVYLQMNSLKPEDTDVYYCAALLD | |
| | | SYYWGQGTQVTVSS | |
| 226 | NBX0375 | QVQLQESGGGLVQAGGSLRLSCVVS | NetB |
| | | GSIMSIRVMGWYRQAPGKQRELVAT | |
| | | MSRGGTINYADSVRGRFTISRDNAK | |
| | | STVYLQMNSLKPEDTDVYYCAALLD | |
| | | SYYWGQGTQVTVSS | |
| 227 | NBX0376 | QVQLQESGGGLVQAGGSLRLSCAAS | NetB |
| | | ASIISIRVMGWYRQAPGKQRELVAT | |
| | | MSRGGTINYADSVRGRFTISRDNAK | |
| | | STVYLQMTSLKPEDTAVYYCAALLD | |
| | | SYYWGQGTQVTVSS | |
| 228 | NBX0377 | QVQLQESGGGLVQAGGSLRLSCVVS | NetB |
| | | GSIMSIRVMGWYRQAPGKQRELVAT | |
| | | MSRGNTINYADSVKGRFTISRDNAK | |
| | | STVFLQMNSLKPEDTDVYYCAALLD | |
| | | SYYWGQGTQVTVSS | |
| 229 | NBX0378 | QVQLQESGGGLVQAGGSLRLSCAAS | NetB |
| | | ASIMSIRVMGWYRQAPGKQRELVAT | |
| | | MSRGNTINYADSVRGRFTISRDNAK | |
| | | STVYLQMNSLKPEDTAVYYCAALLD | |
| | | SYYWGQGTQVTVSS | |
| 230 | NBX0379 | QVQLQESGGGLVQAGGSLRLSCVVS | NetB |
| | | GSIMSIRVMGWYRQAPGKQRELVAT | |
| | | MSRGNTINYADSVRGRFTISRDNAK | |
| | | STVYLQMNSLKPEDTAVYYCAALLD | |
| | | SYYWGQGTQVTVSS | |
| 231 | NBX0380 | QVQLQESGGGLVQAGGSLRLSCVVS | NetB |
| | | GSIISIRVMGWYRQAPGKQRELVAT | |
| | | MSRGGTINYADSVRGRFTISRDNAK | |
| | | STVFLEMNSLKPEDTAVYYCAALLD | |
| | | SYYWGQGTQVTVSS | |
| 232 | NBX0381 | QVQLQESGGGLVQAGGSLRLSCAAS | NetB |
| | | ASIISIRVMGWYRQAPGKQRELVAT | |
| | | MSRGNTINYADSVRGRFTISRDDAK | |
| | | NTVYLQMNSLRPDDTAVYYCAALLD | |
| | | SYYWGQGTQVTVSS | |
| 233 | NBX0501 | QVQLQESGGGLVQAGGSLRLSCAAS | NetB |
| | | GSIFSINVMGWYRQAPGKQRDLVAL | |
| | | ITSGGSTTYADSVKGRFTISRDNAK | |
| | | NTVYLQMNSLKPEDTAVYYCNAAQS | |
| | | RTSWLFPDEYDYWGQGTQVTVSS | |
| 234 | NBX0502 | QVQLQESGGGLVQAGGSLRLSCAAS | NetB |
| | | GRTFSIYAMGWFRQAPGKEREFVAV | |
| | | INRGGGTTTYADSVKGRFTISRDNT | |
| | | KNTVSLQMNSLKPDDTAVYYCAADR | |
| | | VTDTYYYLNPESYDYWGQGTQVTVS | |
| | | S | |
| 235 | NBX0503 | QVQLQESGGGLVQAGGSLRLSCAAS | NetB |
| | | GSGRRVGYMAWYRQTPGKQRESVAT | |
| | | ISRAGATKYADSVKDRFTISRDNAK | |
| | | DTVYLQMNSLKPDDTAVYYCFASLI | |
| | | DAGTYWGQGTQVTVSS | |
| 236 | NBX0504 | QVQLQESGGGLVQAGGSLRLSCAAS | NetB |
| | | GRTFSIYAMGWFRQAPGKEREFVAV | |
| | | INRSGGTTTYADSVKGRFTISRDNT | |
| | | KNTVSLQMNSLKPDDTAVYYCAADR | |
| | | VTDTYYYLNPESYDYWGQGTQVTVS | |
| | | S | |
| 237 | NBX0505 | QVQLQESGGGLVQAGGSLRLSCAAS | NetB |
| | | GMSFSLGTIYWYRQAPGKQREFVAF | |
| | | ITNADTTMYANSVKGRFTISRDNGK | |
| | | NTVFLLMNNLKPEDSAVYYCNTATS | |
| | | WGQGTQVTVSS | |
| 238 | NBX0506 | QVQLQESGGGLVQAGGSLRVSCAAS | NetB |
| | | GSGRRVGYMAWYRQTPGKQRELVAT | |
| | | ISRAGATNYADSVKDRFTISRDNAK | |
| | | NTVYLQMNSLKPDDTAVYYCFASVF | |
| | | DAGTYWGQGTQVTVSS | |
| 239 | NBX0507 | QVQLQESGGGLVQAGGSLRLSCAAS | NetB |
| | | GSGRRVGYMAWYRQTPGKQRELVAT | |
| | | ISRAGATNYADSVKDRFTISRDNAK | |
| | | NTVYLQMNSLKPDDTAVYYCFASIF | |
| | | DAGTYWGQGTQVTVSS | |
| 240 | NBX0508 | QVQLQESGGGLVQAGGSLRLSCVAS | NetB |
| | | GSGSRINYMAWHRQTPGRQRELVAV | |
| | | INRTGAANYARSVKDRFTISRDNAK | |
| | | NTVYLQMNDLKPDDTAIYYCFASYL | |
| | | GAGAYWGQGTQVTVSS | |
| 241 | NBX0509 | QVQLQESGGGLVQAGGSLRLSCAAS | NetB |
| | | GRTFSTYTVGWFRQAPGKEREFVAS | |
| | | ITWNGGTILYADSVKGRFTISRDNA | |
| | | KNTVLLQMNSLKPEDTAVYYCVMGA | |
| | | AGQGWRYWGQGTQVTVSS | |
| 242 | NBX0510 | QVQLQESGGGLVQAGGSLRLSCVAS | NetB |
| | | GSGSRINYMAWHRQTPGRQRELVAV | |
| | | INRTGAAKYADSVKDRFTVSRDNAE | |
| | | NTVYLQMNDLKPDDTAVYYCWASYL | |
| | | GAGTYWGQGIQVTVSS | |
| 243 | NBX0511 | QVQLQESGGGLVQPGGSLRLSCAAS | NetB |
| | | GFTFSRNYMSWVRQAPGKGLEWVGS | |
| | | IYSDDSTNYAPSVKGRFTISRDNAA | |
| | | NTLYLQMNSLKSEDTAVYYCSKEGG | |
| | | LRGQGTQVTVSS | |
| 244 | NBX0512 | QVQLQQSGGGLVQAGGSLRLSCAAS | NetB |
| | | GSGRRVGYMAWYRQTPGKQRELVAT | |
| | | ISRAGATNYADSVKDRFTISRDNAK | |
| | | NTVYLQMNSLKPDDTAVYYCFASVF | |
| | | DAGTYWGQGTQVTVSS | |
| 245 | NBX0513 | QVQLQESGGGLVQAGGSLRLSCAAS | NetB |
| | | GSGRRVGYMAWYRQTPGKQRELVAT | |
| | | ISRAGATNYADSVKDRFTISRDNAK | |
| | | NTVYLQMNSLKPDDTAVYYCFASLF | |
| | | DAGTYWGQGTQVTVSS | |
| 246 | NBX0514 | QVQLQESGGGLVQAGGSLRLSCAAS | CnaA |
| | | GRTFSGRTMAWFRQAPGKEREFVAA | |
| | | ITWSGGTTYYPDSVKGRFTISRDIP | |
| | | KNTLYLQMNSLKSEDTAVYYCASDG | |
| | | PWRATTPDAYDYWGQGTQVTVSS | |
| 247 | NBX0515 | QVQLQESGGGLVQAGGSLRLSCAAS | CnaA |
| | | GSIGTIDSMGWYREAPGKRRELVAF | |
| | | IMFSGRTIYQDSVKGRFSISGDNAK | |
| | | KTVSLQMTSLKPEDTGVYYCYSNQY | |
| | | WGQGTQVTVSS | |
| 248 | NBX0517 | QVQLQQSGGGLVQPGGSLRLSCAAS | CnaA |
| | | EFSLLFGTIGWFRQAPGKEREGVSC | |
| | | VSSSDGSTYYADSVKGRFTISRDKA | |
| | | KNTWYLQMHSLKPEDTAVYYCATRC | |
| | | TVVPGITWGQGTQVTVSS | |
| 249 | NBX0518 | QVQLQESGGGVVQAGGSLRLSCVAP | CnaA |
| | | GSITRVGGMGWYRQPPGKERELVAL | |
| | | INEVGNTNYGDSVKGRFTISRDNAK | |
| | | KTVYLEMNSLKPEDTAVYYCWIPPI | |
| | | PWGQGTQVTVSS | |
| 250 | NBX0519 | QVQLQESGGGLVQPGGSLRLSCATS | CnaA |
| | | PFSLRLGVVGWFRQAPGREREGVSC | |
| | | ISSSEGSTHYADSVKGRFTISRDNA | |
| | | KNTVYLQMNSLKPEDTAVYYCATRC | |
| | | TVVPGITWGQGTQVTVSS | |
| 251 | NBX0520 | QVQLQESGGGLVQAGDSLRLSCAAS | CnaA |
| | | ARTSSSRAMGWFRQTPVREREFVAA | |
| | | ISWSGGRTAYADSVKGRFTLSKYDK | |
| | | DTVSLTMNSLKPEDTAVYYCAARRS | |
| | | DFTGDYAYSGRSAYDYWGQGTQVTV | |
| | | SS | |
| 252 | NBX0521 | QVQLQESGGGSVQAGGSLRLSCAAS | CnaA |
| | | GSTFIFDKMDWYRQTPEKSRELVAT | |
| | | LMSRGDPYYLDSVKGRFTITRDNAK | |
| | | NTVYLQMNSLKPEDTAVYVCRGRAG | |
| | | ERVYWGQGTQVTVSS | |
| 253 | NBX0522 | QVQLQESGGGLVQPGGSLRLSCAAS | CnaA |
| | | GRTFSGVIVGWFRQAPGKEREFLAT | |
| | | TLWSGGSTYYTDSVKGRFTISRDVA | |
| | | KNMVYLQMNSLKPEDAAIYYCAAKY | |
| | | GGSLSYMHPTGYTYWGQGTQVTVSS | |
| 254 | NBX0523 | QVQLQESGGGLVQAGGSLRLSCAAS | CnaA |
| | | RIVFTISTMAWFRQAPGKEREFVAS | |
| | | INRSGALTSHANSVKGRFTISRDAA | |
| | | KNTVYLQMNSLKDEDTAIYYCAASK | |
| | | ANMPALPANYDYWGQGTQVTVSS | |
| 255 | NBX0524 | QVQLQESGGGVVQAGGSLRLSCVAP | CnaA |
| | | GSITRLGSMGWYRQPPGKQRELVAL | |
| | | ITAVGNTNYGDSVKGRFTISRDNAK | |
| | | KMVYLEMNSLKPEDTAVYYCWIPPI | |
| | | PWGQGTQVTVSS | |
| 256 | NBX0525 | QVQLQESGGGVVQAGGSLRLSCVAP | CnaA |
| | | GSITRLGGMGWYRQTPGKQRELVAL | |
| | | IDTVGNTNYGESVKGRFTISRDNAK | |
| | | KMVYLEMNSLKPEDTAVYYCWIPPI | |
| | | PWGQGTQVTVSS | |
| 257 | NBX0526 | QVQLQESGGGLVQAGDSLTLSCVAS | CnaA |
| | | ERAFMYNMAWFRQAPGKERDFVAVR | |
| | | NWNVERTNYADFAKGRFTISRDAAK | |
| | | KVMYLKMNNLKPEDTAVYYCATTRV | |
| | | WPTQHQMGQIEYWGQGTQVTVSS | |
| 258 | NBX0527 | QVQLQESGGGLVQAGGSLRLSCAAS | CnaA |
| | | SSFNTMGWYRQAPGKQRELVAGITS | |
| | | GGTIKYGDSVKGRFTISGDNAKNTV | |
| | | YLQMDSLKPEDTAVYYCVADWQYGS | |
| | | TWNYWGQGTQVTVSS | |
| 259 | NBX0528 | QVQLQESGGGLVQAGDSLRLSCAAS | CnaA |
| | | GRNFDYYSMGWFRQAPGNERIFVAA | |
| | | INWRGAVIDYPDSVKGRFTISRDNA | |
| | | KNRVYLQMNSLKPEDTAVYYCAAAS | |
| | | SSSRLLEPIGYNYWGQGTQVTVSS | |
| 260 | NBX0529 | QVQLQESGGGLVQAGGSLRLSCAAS | CnaA |
| | | GSMFSINDMTWYRQAPGKQREMVAT | |
| | | ISSGGTTDYTESVKGRFFVIRDNAK | |
| | | ITVYLQMNKLRPEDSGVYYCAGNLK | |
| | | RSETSYYWKTGQGIQVTVSS | |
| 261 | NBX0530 | QVQLQESGGGLVQTGGSLKLSCATS | CnaA |
| | | GRTFSRYHMGWFRQAPGKEREFVAA | |
| | | ISLSGGGTAFANFVEGRFTISRDNA | |
| | | KNTLYLQMNSLKPEDTAVYYCTADR | |
| | | HEWGRLMKGDYWGQGTQVTVSS | |
| 262 | NBX0531 | QVQLQESGGGSVQAGGSLTVSCSAS | CnaA |
| | | GRTSNSYNMAWFRQGPGKERELVAA | |
| | | ISWTGGFTSYTNSVKDRFTISRENA | |
| | | KNTVYLQMNSLKPEDTAVYYCAATS | |
| | | RSLTSAMTREIRAYDYWGQGTQVTV | |
| | | SS | |
| 263 | NBX0532 | QVQLQESGGGLVQAGGSLRLSCAAS | CnaA |
| | | GSTFSFNKMDWYRQAPEKQRELVAT | |
| | | FMNDGNTYYVDSVKGRFTISRDNAK | |
| | | NTVYLQMNSLKFEDTAVYYCRGRAG | |
| | | MEVYWGQGTQVTVSS | |
| 264 | NBX0533 | QVQLQESGGGLVQPGGSLTLSCATS | CnaA |
| | | PLTLRLGPIGWFRQAPGKEREGVSC | |
| | | ISSRDDKNYAESVKGRFTISRDNAK | |
| | | NMVYLQMNSLKPEDTAVYYCATRCT | |
| | | VVPGISWGQGTQVTVSS | |
| 265 | NBX0534 | QVQLQESGGGLVQAGDSLRLSCAAS | CnaA |
| | | GRNFGYYTMGWFRQAPGNERIFVAA | |
| | | ITWRGVIHHADSVKGRFTISRDNAK | |
| | | NTVYLQMNSLKPEDTAVYYCAAASS | |
| | | SSRPLEPIGYNYWGQGTQVTVSS | |
| 266 | NBX0535 | QVQLQESGGGLVQAGGSLRLSCTAS | CnaA |
| | | GDIFSAAGMAWFRQTPGKERDLVAY | |
| | | VTWDGGTTRYKDSVKGRFTISRDNA | |
| | | KNTVLLQMNSLKPEDTAVYYCAAGN | |
| | | TGPFNLLHSSAQYAYWGQGTQVTVS | |
| | | S | |
| 267 | NBX0536 | QVQLQESGGGLVQAGGSLRLSCATS | CnaA |
| | | PLTLRLGAIGWFRQAPGKEREMVSC | |
| | | ITSTEDKNYADSVKGRFTISRDNAK | |
| | | TMVYLQMNSLKLEDTAVYYCATRCT | |
| | | VVPGISWGQGTQVTVSS | |
| 268 | NBX0537 | QVQLQESGGGVVQAGGSLRLSCVAP | CnaA |
| | | GSITRIGGMGWYRQPPGKQRELVAL | |
| | | INTVGNTNYGDSVKGRFTISRDNAK | |
| | | KTVYLEMNSLKPEDTAVYYCWIPPL | |
| | | PWGQGTQVTVSS | |
| 269 | NBX0538 | QVQLQQSGGGLVQAGGSLRLSCTAS | NetB |
| | | GRSFSRYIMGWFRQAPGKERESVAR | |
| | | IAPSGGSAYYADSVKGRFTISRDNA | |
| | | KNTVYLQMNNLKSEDTAVYHCAARY | |
| | | DMDYEYKTWGPGTQVTVSS | |
| 270 | NBX0539 | QVQLQESGGGLVQAGGSLRLSCVAS | NetB |
| | | GSGSRIGFMAWHRQTPGRQRELVAV | |
| | | INRTGATRYADSVKDRFTISRDNAK | |
| | | NTVYLQMNDLKPDDTALYYCFASVV | |
| | | DAGTYWGQGTQVTVSS | |
| 271 | NBX0540 | QVQLQESGGGLVQPGGSLRVSCAAS | NetB |
| | | GLTFSDYAMGWFRQAPGQEREFVAR | |
| | | ISLTAASTLYADSVRGRFTISRDNA | |
| | | KNTVYLQMNSLRPDDTAVYYCAAQG | |
| | | RILRGRGLFKASDYDYWGQGTQVTV | |
| | | SS | |
| 272 | NBX0541 | QVQLQQSGGGSVQTGGSLALSCAAS | NetB |
| | | GTISIFDPMGWYRQAPGKQRELVAS | |
| | | ISEGSTNYANSVKGRFTISRDNAKK | |
| | | TVSLQMNSLEPADTAVYYCRLSRYY | |
| | | NSNIYWGQGTQVTVSS | |
| 273 | NBX0542 | QVQLQESGGGLVQAGGSLRLSCAAS | NetB |
| | | RNIYGINVIAWYRQAPGKQREMVAR | |
| | | SANGGTTRYADSVKGRFTISRDNVK | |
| | | NIVYLQMSSLKPEDTAAYYCKAELY | |
| | | TLQHNYEYWGQGTQVTVSS | |
| 274 | NBX0543 | QVQLQESGGGSVQTGGSLALSCVAS | NetB |
| | | GTLSLFDPMGWYRQAPGKQRELVAS | |
| | | ISGLSTNYANSVKGRFTISRDDAKK | |
| | | TVSLQMNSLEPADTAVYYCHLSRYY | |
| | | NSNIYWGQGTQVTVSS | |
| 275 | NBX0544 | QVQLQESGGGLVQAGGSLRLSCAAS | NetB |
| | | GRVLSINAMGWYRQAPGKRREMVAR | |
| | | ITNGGSTNYAGSVKGRFTISRENTK | |
| | | NTMYLQMNSLKPEDTAVYYCLAEER | |
| | | PYYGGPLEYWGQGTQVTVSQ | |
| 276 | NBX0545 | QVQLQESGGGLVQAGGSLRLSCAAS | NetB |
| | | RTTFRVGTMAWFRQDPGKQRELVAG | |
| | | ITSGGSTNYADSVKGRFTISRDNAK | |
| | | NTIYLQMNSLKPEDTGIYVCFANIV | |
| | | DRPVSWGQGTQVTVSS | |
| 277 | NBX0546 | QVQLQQSGGGAVQAGGSLTLSCVAS | NetB |
| | | GSGSRIGLMAWYRQTPGRQRELVAV | |
| | | IKGTGTTRYADSVKDRFTISRDNAK | |
| | | NTMYLQMNDLKPDDTALYYCFASVL | |
| | | GAGTYWGQGTQVTVSS | |
| 278 | NBX0547 | QVQLQESGGGSVQTGGSLALSCAAS | NetB |
| | | GTISLFDSMGWYRQAPGKQRELVAS | |
| | | ITEGSTNYANSVKGRFTISRDNAKK | |
| | | TVSLQMNSLEPADTAVYYCRLSRYY | |
| | | NSNIYWGQGTQVTVSS | |
| 279 | NBX0548 | QVQLQQSGGGLVQSGGSLRLSCAAS | NetB |
| | | ETSLNFDDMRWYRQTPGKRREWVAI | |
| | | INTFPAGTTASYADSVKGRFTISKV | |
| | | NGENTVHLQMNRLKPEDTAVYYCNA | |
| | | GDYWGQGTQVTVSS | |
| 280 | NBX0549 | QVQLQESGGGLVQAGGSLRLSCTAS | NetB |
| | | GSDSSINYMGWYRQAPGKQRVLLAA | |
| | | ISRDGRSNYADSVRGRFTISRDNAK | |
| | | NTVDLQMNSLKPEDTAVYYCYVDPL | |
| | | GRVPRWGQGTQVTVSS | |
| 281 | NBX0550 | QVQLQESGGGAVQAGGSLTLSCVAS | NetB |
| | | GTVNLMAWYRQTPGRQRELVAVIKG | |
| | | TGTTRYADSVKDRFTISRDNAKNTM | |
| | | YLQMNDLKPDDTALYYCFASVLGAG | |
| | | TYWGQGTQVTVSS | |
| 282 | NBX0551 | QVQLQESGGGLVQAGGSLRLSCAAS | NetB |
| | | GSIFSRNIILWHRQAPGKQRELVGG | |
| | | INTGGRTNYESSVKGRFTISRDNAK | |
| | | NTVYLQMDRLKPEDTAVYYCNAPSL | |
| | | GYWGQGTQVTVSS | |
| 283 | NBX0552 | QVQLQQSGGGLVQAGGSLRLSCVAS | NetB |
| | | GSGSINYMAWHRQTPGRQRELVAVI | |
| | | NRTGAARYADSVKDRFTISRDNAEN | |
| | | TMYLQMNDLKPDDTAVYYCFASALG | |
| | | AGVYWGQGTQVTVSS | |
| 284 | NBX0553 | QVQLQESGGGLVQPGGSLRLSCAAS | NetB |
| | | GSGWRVGYMAWYRQTPGKQRELVAT | |
| | | ISRAGATRYEDSVKDRFTISRDNAK | |
| | | NTVYLQMNSLKPDDTAVYYCFASII | |
| | | DAGTYWGQGTPVTVSS | |
| 285 | NBX0561 | QVQLQESGGGLVQAGGSLRLSCTAS | CnaA |
| | | GENFSTYVMGWFRQAPGKEREFVAA | |
| | | HNWRGGGTYYADSVKGRFTISRDHA | |
| | | KNTVYLEMNSLKPEDTAVYYCAARS | |
| | | GGSYTYTGSYHYWGQGTQVTVSS | |
| 286 | NBX0801 | QVQLQESGGGLVQAGDSLRLSCAAA | CnaA |
| | | GRTFSSYAMGWFRQAPGKEREFVAT | |
| | | ISRSGGSTYYADSVKGRFTISRDNA | |
| | | KNTVYLQMNSLKPEDTAVYYCAANR | |
| | | YGSSSYQGQYASWGQGTQVTVSS | |
| 287 | NBX0802 | QVQLQESGGGLVQAGGSLRLSCAAS | CnaA |
| | | GRTFSSYHMGWFRQAPGKEREFVAT | |
| | | ISRSGGFTSYADSVKGRFTISRDNA | |
| | | KNTVWLQMNSLKPEDTAVYYCAAQQ | |
| | | WPDPRNPNGYDYWGQGTQVTVSS | |
| 288 | NBX0803 | QVQLQESGGGLVQAGGSLRLACAAS | CnaA |
| | | GRTFINYGMAWFRQSPGKEREFVAA | |
| | | VSISGAGTAYVEPVKDRFTISRDNT | |
| | | KNTLYLQMNTLKPEDTALYYCAAAK | |
| | | AGHWGRDANYDYWGQGTQVTVSS | |
| 289 | NBX0804 | QVQLQQSGGGLVQAGGSLRLSCSAS | CnaA |
| | | GRTLTAYGMAWFRQSPGKEREFVAA | |
| | | VSLSGASTAYVEPVKDRFTISRDNT | |
| | | QNTVYLQMNSLKPEDTALYYCAAAK | |
| | | AGQWGRDAKYDYWGQGTQVTVSS | |
| 290 | NBX0805 | QVQLQQSGGGLVQAGGSLRLSCAAS | CnaA |
| | | GRTFSTYAMGWFRQAPGKEREFVAG | |
| | | ISWSGGRISYTDSVKGRFTISRDNA | |
| | | KNTVYLQMNSLKPEDTAVYYCTADL | |
| | | KGLWALGLPGHYASWDSWGQGTQVT | |
| | | VSS | |
| 291 | NBX0806 | QVQLQESGGGLVQPGGSLRLSCAAS | CnaA |
| | | GSIGSINIMDWYRQAPGKQRDLVAT | |
| | | FTSGGSTVYADSVKGRFTISRDNAK | |
| | | DTVYLQMNSLKPEDTAVYYCRARRG | |
| | | WAIYWGQGTQVTVSS | |
| 292 | NBX0807 | QVQLQQSGGGLVQAGDSLRLSCAAS | CnaA |
| | | GRTFSSYGMGWFRQATGKEREFVAG | |
| | | ISRTGSGTAYADSVKSRFTISRDNA | |
| | | KNTVYLQMNSLKAEDTAVYYCAADS | |
| | | GGSWGRGTTYDYWGQGTQVTVSS | |
| 293 | NBX0808 | QVQLQQSGGGSVQAGGSLRLSCRAS | CnaA |
| | | ARASSIGAMAWFRQAPGKDRELVAA | |
| | | VTAGADTTYYRDFVKGRFTLSRDNA | |
| | | KNTVYLQMNSLKLDDTAVYYCAAYN | |
| | | TAGWGEPHQSYRYWGQGTQVTVSS | |
| 294 | NBX0809 | QVQLQESGGGLVQAGGSLKLSCVAS | CnaA |
| | | GLTFGNYDMAWFRQAPGKEREFVTH | |
| | | ISSSGAYTSYAYFVKGRFTISRDIA | |
| | | KNTVYLQMNSLKPEDTAIYYCAGRR | |
| | | SVVVRSFDYDYWGQGTQVTVSS | |
| 295 | NBX0810 | QVQLQQSGGGLVHPGGSLRLSCAAS | CnaA |
| | | GRIFNANGMYWYRQAPGKQRELVAS | |
| | | LYRSGSTNYLDSVKGRFTISRDNAK | |
| | | NTVYLQMNSLKPEDTAVYYCNVNWA | |
| | | LHDSWGQGTQVTVSS | |
| 296 | NBX0811 | QVQLQESGGGLVQAGDSLRLSCAAS | CnaA |
| | | ERTFSSDGMAWFRQATGKEREFVAG | |
| | | ISRTGSATAYAEFVKSRFTISRDNA | |
| | | KNTVYLQMNSLKAEDTAVYYCAANS | |
| | | GGHWWRGATYDYWGQGTQVTVSS | |
| 297 | NBX0812 | QVQLQESGGGLVQAGGSLRLSCTAS | CnaA |
| | | GTIFSANGMYWYRQALGQRRELVAS | |
| | | LYRDGSTNYADSVKGRFTISRDNAK | |
| | | NTVYLQMNSLKPEDTAVYYCNVNWA | |
| | | LHDSWGQGTQVTVSS | |
| 298 | NBX0847 | QVQLQESGGGVVQAGDSLRLSCTAS | CnaA |
| | | TRASIVGAMAWFRQAPGRNRDIVAA | |
| | | IAAGSPSTPYYADSVKGRFAISRDN | |
| | | AKNTVYLQMNSLKSEDTAIYYCAAY | |
| | | NTANWGQPHQSYRHWGQGIQVTVSS | |
| 299 | NBX0866 | QVQLQESGGGLVQPGGSLRLSAAAS | CnaA |
| | | GSILNINVMAWFRQAPGKQREWVAS | |
| | | IYRDGSTYYADSVKGRFTISRDNAK | |
| | | NTVYLQMNSLKPEDTAVYYCNVVTY | |
| | | GSNRRDFWGQGTQVTVST | |
| 300 | NBX0867 | QVQLQESGGGLVQAGDSLRLSCAAS | CnaA |
| | | GRTFSSYAMGWFRQAPGKDREFVST | |
| | | ISRSGGSTYYADSVKGRFTISRDNA | |
| | | KNTVYLQMNSLKPEDTAVYYCAANR | |
| | | YGSSSYQGQYGSWGQGTQVTVSS | |
| 301 | NBX0868 | QVQLQQSGGGLVQAGDSLRLSCAAS | CnaA |
| | | GRTFSSYAMGWFRQAPGKEREFVAS | |
| | | ISRSGGSTYYADSVKVRFTISRDNA | |
| | | KNTVYLQMNSLKPEDTAVYYCAANR | |
| | | YGSSSYQGQYDYWGQGTQVTVSS | |
| 302 | NBX0869 | QVQLQESGGGLVQAGGSLRLSCTAS | CnaA |
| | | GTIFSINGMYWYRQALGKRRELVAS | |
| | | LYRGGSTNYADSVKGRFTISRDNAK | |
| | | NTVYLQMNSLKPEDTAVYYCNVNWA | |
| | | LQDSWGQGTQVTVSS | |
| 303 | NBX0870 | QVQLQESGGGLVQAGGSLRLSCAAS | CnaA |
| | | TSDGSINVMDWYRQTPGKQRDLVAT | |
| | | ITSLGSQVYADSVKGRFTISRDNAK | |
| | | DTVYLQMNSLKPEDTAVYYCRARRG | |
| | | WAIYWGQGTQVTVSS | |
| 304 | NBX0871 | QVQLQQSGGGLVQAGGSLRLSCAAS | CnaA |
| | | GRTFNIYAMGWFRQAPGKEREFVAG | |
| | | ISDSGGSANYADSVKDRFTISMDNA | |
| | | KNTVYLQMNSLKPEDTAVYYCAADL | |
| | | TGLWALGLPGHYASWDSWGQGTQVT | |
| | | VSS | |
| 305 | NBX0872 | QVQLQESGGGLVQPGGSLRLSCAAS | CnaA |
| | | GFTFRSSAMSWVRQVPGKGLEWVSS | |
| | | IGSDGENIYYADAVKGRFTISRDNA | |
| | | KNTMYLQMNSLKLEDTAVYYCOLGR | |
| | | TVLDYFKGQGTQVTVSS | |
| 306 | NBX0873 | QVQLQESGGGLVQPGGSLRLSCAAS | CnaA |
| | | GRTFINYGMAWFRQSPGKEREFVAA | |
| | | VSSSGAGTAYVEPVKDRFTISRNNT | |
| | | KNTVYLQMNSLKPEDTALYYCAAAK | |
| | | AGQWGRYANYDYWGQGTQVTVSS | |
| 307 | NBX0874 | QVQLQQSGGGLVQAGDSLRLSCAAS | CnaA |
| | | GRTFSSYAMGWFRQAPGKEREFVAA | |
| | | ISRSGGTTYYADSVKGRFTISRDNA | |
| | | KNTVYLQMNTLKPEDTAVYYCAANP | |
| | | YGSSSYQGQYGSWGQGTQVTVSS | |
| 308 | NBX0875 | QVQLQQSGGGLVQAGDSLRLSCAAS | CnaA |
| | | GRAFSGYAMGWFRQAPGREREFVAA | |
| | | ISRGGGTTYYADSVKGRFTISRDNA | |
| | | KNTVYLQMNSLKPEDTAVYYCAANR | |
| | | YGSSSYQGQYGSWGQGTQVTVSS | |
| 309 | NBX0876 | QVQLQESGGGLVQAGGSLRLSCAAS | CnaA |
| | | GRTFINYGMAWFRQSPGKEREFVAA | |
| | | VSSSGAGTAYVEPVKDRFTISRDNT | |
| | | KNTVYLQMDTLKPEDTALYYCAAAK | |
| | | AGHWGRDANYDYWGQGTQVTVSS | |
| 310 | NBX0877 | QVQLQESGGGMVEPGGSLRLSCAAS | NetB |
| | | GSISSITFMGWHRQAPGKEGEFVAL | |
| | | IARSGTTTYADSVKGRFSISRDNAK | |
| | | NTVYLQMNNLKPEDTALYYCYVDRR | |
| | | GAVPTWGQGTQVTVSS | |
| 311 | NBX0878 | QVQLQQSGGGLVEPGGSLRLSCAAS | NetB |
| | | GSISSITFMGWHRQAPGEQGELVAL | |
| | | IARSGTTTYADSVKGRFTISRDNAK | |
| | | NTVYLQMNNLKPEDTALYYCYVDRR | |
| | | DVVPTWGQGTQVTVSS | |
| 312 | NBX0879 | QVQLQESGGGLVQAGGSLRLSCAAS | NetB |
| | | GTGFPIITFMGYYRQAPGNQRELVA | |
| | | IISRGGVAKYGDSVKDRFTISRDNA | |
| | | KNTVYLEMNSLKPDDTAVYYCYADR | |
| | | ESGSPTWGQGTQVTVSS | |
| 313 | NBX0880 | QVQLQESGGGLVQPGGSLRLSCAAS | NetB |
| | | VSSIGTMGWFRQAPGKQPELVASIS | |
| | | RVGTTNYANSVKGRFTVSRDNAQNT | |
| | | MYLQMNSLKPEDTAVYLCFANVISG | |
| | | PVYWGQGTQVTVSS | |
| 314 | NBX0881 | QVQLQESGGGLVQAGGSLRLSCAAS | NetB |
| | | TRFFSNYAMGWFRQAPGKEREFVAA | |
| | | ISRDGAVPLSGNSVPGRFTISRDNA | |
| | | KNTLYLQMNSLKPEDSAVYYCAASR | |
| | | QGNPYAQTSYDYWGQGTQVTVSS | |
| 315 | NBX0883 | QVQLQESGGEVVAPGGSLSLSCVAS | NetB |
| | | GSADSIKIMGWYRQAPGKQRELVAT | |
| | | ITSGGTTEFAESVKGRFTISRDNAK | |
| | | NTLYMQMNSLSPEDTAVYYCNALVS | |
| | | RRDSAAYFAWGQGTQVTVSS | |
| 316 | NBX0884 | QVQLQESGGGLVQPGGSLRLSCAAS | NetB |
| | | ESIVSITPMMWYRQAPGKQREWVAI | |
| | | TTRDGAPAYADSVKGRFTISRDSAK | |
| | | NTVYLQMNYLKPEDTAVYFCKARKD | |
| | | SHDYWGQGTQVTVSS | |
| 317 | NBX0885 | QVQLQESGGGLVQAGGSLRLSCAAS | NetB |
| | | ETIGSIQRMGWYRQAPGKQRELVAT | |
| | | RTNGGTTNYGDSVRGRFTISVDVAK | |
| | | NTVYLQMNSLKPEDTAVYYCNAHIR | |
| | | EYYSTYDYWGQGTQVTVSS | |
| 318 | NBX0886 | QVQLQESGGGLVQPGGSLRLSCSAS | NetB |
| | | GSISRIRDMAWHRQVPGKQRELVAS | |
| | | ISSGGSTNVADSLKGRFTISRDNGK | |
| | | NTMYLQMDSLKSEDTAVYYCNALFN | |
| | | PIDGPARYYWGQGTQVTVSS | |
| 319 | NBX0887 | QVQLQESGGGLVQPGGSLRLSCSAS | NetB |
| | | GSISRIYDMAWHRQVPGKQRELVAG | |
| | | ISRGGSTNVADSLKGRFTISRDNGK | |
| | | NTVYLQMDNLKSEDTAVYYCTALFN | |
| | | PVDGTARYYWGQGTQVTVSS | |
| 320 | NBX0888 | QVQLQESGGGLVQAGGSLRLSCAAS | NetB |
| | | GTIFSINVMGWYRQAPGKQRELVAS | |
| | | ITSGGQIKYADSVKGRFTTSRDNAK | |
| | | NTVYLQMNSLKPEDTAVYYCNAASS | |
| | | TWPPRDYDYWGQGTQVTVSS | |
| 321 | NBX0889 | QVQLQESGGGLVQPGGSLRLSCAAS | NetB |
| | | RSISSIAAMGWYRQAPGKQRELVAR | |
| | | ITNGGSTNYADSVKGRFTISRDNAK | |
| | | NTVYLQMNSLKPEDTAVYYCNADER | |
| | | PYYGDSVLSWGQGTQVTVSS | |
| 322 | NBX0890 | QVQLQQSGGGLVQAGGSLRLSCAAS | NetB |
| | | GTGFPIITFMGYYRQTPGNQREEVA | |
| | | LINRGGVAKYGDSVKDRFTISRDNA | |
| | | KNTVYLEMNNLKPDDTAVYYCYADR | |
| | | ESGSPTWGQGTQVTVSS | |
| 323 | NBX0891 | QVQLQESGGGLVQAGGSLRLSCAAS | NetB |
| | | GRTFSNYHMAWFRQAPGKEREFVAA | |
| | | ISRGTSTTFYRDSVRDRFTISRDNA | |
| | | KNTAYLQMNSLKPEDTAVYYCAADA | |
| | | DRSTTIYSRDIYDYWGQGTQVTVSS | |
| 324 | NBX0892 | QVQLQESGGGLVQAGDSLRLSCAAS | NetB |
| | | EGTFSNYRMGWFRQAPGKEREFVAA | |
| | | ISRDGAVPLSGNSPLGRFTISRDNA | |
| | | KNTLYLQMNSLKPEDTAVYYCAASR | |
| | | QGLPYVETSYDYWGQGTQVTVSS | |
| 325 | NBX0893 | QVQLQESGGGLVQPGGSLRLSCVAS | NetB |
| | | GSISSITFMGWYRQVLGEQRELVAL | |
| | | SARRGTTTYADSVKGRFTISRDNAK | |
| | | NTVYLQMNNLKPEDTALYYCYVDRR | |
| | | DEVPTWGQGTQVTVSS | |
| 326 | NBX0894 | QVQLQQSGGGLVQAGGSLRLSCAAS | NetB |
| | | GGTFSSYVMAWFRQAPGKEREFLAA | |
| | | IRWSRGSTYYADSVKGRFTVFRDTV | |
| | | ENTVYLQMNSLKPEDTAVYYCAADG | |
| | | NPAKLVLDQYGMDYWGKGTLVTVSS | |
| 327 | NBX0895 | QVQLQQSGGGLVEPGGSLRLSCAAS | NetB |
| | | GSISEITYMGWHRQAPGEQRELVAL | |
| | | IARVGTTRYADSVKGRFTISRDNAK | |
| | | NTVYLQMNNLKPEDTALYYCYVDQR | |
| | | GVVPTWGQGTQVTVSS | |
| 328 | NBX0896 | QVQLQESGGGSVQAGGSLRLSCRAS | CnaA |
| | | ARASSIGAMAWFRQAPGKDRELVAA | |
| | | VNAGADTTYYRDFVKGRFTISRDNA | |
| | | KNTVYLQMNSLKLDDTAVYYCAAYN | |
| | | TAGWGEPHQSYRYWGQGIQVTVSS | |
| 329 | NBX0897 | QVQLQESGGGLVQPGGSLSLSCAAS | CnaA |
| | | GSIFIISTMGWYRQAPGKQRELVAT | |
| | | ITSGGSTNYADPVKGRFTISRDNAK | |
| | | NMVYLQMNSLKPEDTAVYYCNAEVH | |
| | | VWGVPGPRDYWGQGTQVTVSS | |
| 330 | NBX0898 | QVQLQESGGGLVQAGDSLRLSCAAS | CnaA |
| | | GRTFSSYAMGWFRQAPGKEREFVAT | |
| | | ISRSGGSTYYADSVKGRFTISRDNA | |
| | | KNTVYLQMNSLKPEDTAVYYCAANP | |
| | | YGSSSYQGQYASWGQGTQVTVSS | |
| 331 | NBX0899 | QVQLQQSGGGLVQAGGSLRLSCAAS | CnaA |
| | | GSIFSSNGMYWYRQAPGKQRELVAS | |
| | | LYRSGSTNYADSVKGRFIISRDNAK | |
| | | NTVYLQMNSLKPEDTAVYYCNVNWA | |
| | | LHDSWGQGTQVTVSS | |
| 332 | NBX08100 | QVQLQESGGGLVQAGGSLRLSCAAS | CnaA |
| | | GRTFSAYGMAWFRQSPGKEREFVAA | |
| | | VSGGGGGTAYAEPVKDRFTISRDNA | |
| | | KNTVYLQMNTLKPEDTALYYCAAAT | |
| | | AGHWGRDANYDYWGQGTQVTVSS | |
| 333 | NBX08101 | QVQLQESGGGLVQAGGSLRLSCAAS | CnaA |
| | | GSIFSSNGMYWYRQAPGKQRELVAS | |
| | | LFRSGSTNYADSVKGRFTISRDNAQ | |
| | | NTVYLRMNSLKPEDTAVYYCNVNWA | |
| | | LHDSWGPGTQVTVSS | |
| 334 | NBX08102 | QVQLQESGGGLVQAGDSLRLSCAAS | CnaA |
| | | GRTFSSYAMGWFRQAPGKEREFVAA | |
| | | ISRSGGTTYYADSVKGRFTISRDNA | |
| | | KNTVYLQMNTLKPEDTAVYYCAANP | |
| | | YGSSSYQGQYGSWGQGTQVTVSS | |
| 335 | NBX08103 | QVQLQESGGGLVQPGGSLRLSCAAS | CnaA |
| | | GIIHSINVMGWYRQAPGKQRELVAI | |
| | | ISSGGRTTYADSVKGRSTITGDNDK | |
| | | NTVYLQMNSLKPEDTAVYYCTMVWG | |
| | | LRYYWGQGTQVTVSS | |
| 336 | NBX08104 | QVQLQQSGGGFVRPGESLTLSCAAS | CnaA |
| | | TSIFSSNGMYWYRQAPGKRRELVAS | |
| | | LFRSGSTNYADSVKGRFTISRDNAK | |
| | | NTVYLQMNSLKPEDTAVYYCNVNWA | |
| | | LHDSWGQGTQVTVSS | |
| 337 | NBX08105 | QVQLQESGGGLVQAGDSLRLSCAAS | CnaA |
| | | GRTFSSYAMAWFRQAPGKEREFVAA | |
| | | ISRGGGTTYYADSVKGRFTISRDNA | |
| | | KNTVYLQMNSLKPEDTAVYYCAANP | |
| | | YGSSSYQGQYGSWGQGTQVTVSS | |
| 338 | NBX08106 | QVQLQESGGGLVQAGGSLRLSCAAS | CnaA |
| | | GSIFSSNGMYWYRQAPGKQRELVAS | |
| | | LYRSGSTNYADSVKGRFIISRDNAK | |
| | | NTVYLQMNSLKPEDTAVYYCNVNWA | |
| | | LHDSWGQGTQVTVSS | |
| 339 | NBX08107 | QVQLQQSGGGEVQPGGSLRLSCAAS | CnaA |
| | | GSIFSSNGMYWYRQAPGKQRELVAS | |
| | | LYRSGSTNYADSVKGRFIISRDNAK | |
| | | NTVYLQMNSLKPEDTAVYYCNVNWA | |
| | | LHDSWGQGTQVTVSS | |
| 340 | NBX08108 | QVQLQESGGGLVQAGGSLRLSCAAS | CnaA |
| | | RSILSANGMYWYRQAPGKQRELVAS | |
| | | LYRSGSTDYADSVKGRFTISRDDSR | |
| | | DTMYLQMNSLKPEDTAVYYCNVNWA | |
| | | LHDSWGQGTQVTVSS | |
| 695 | NBX03161 | QVQLQESGGGLVQAGGSLRLSCAAS | Cpa |
| | | GRSLSTVSMGWFRQAPGKEREFVAA | |
| | | IAWSGGRTTYADSVKGRFTISRDNA | |
| | | TNTVYLQMNSLKPEDTAVYYCAGYR | |
| | | GVLFITTKSAYDYWGQGTQVTVSS | |
| 696 | NBX03162 | QVQLQESGGGLVQPGGSLRLSCAAS | Cpa |
| | | GFTFSSYWMYWVRQAPGKGLEWVSS | |
| | | ISTGGTSTYYTDSVKGRFTISRDNA | |
| | | KNTLYLQMNSLKPEDTALYYCAKLV | |
| | | AYGMDYWGKGTLVTVSS | |
| 697 | NBX03163 | QVQLQESGGGLVQAGDSLRLSCATS | Cpa |
| | | GRTFSRYTMGWFRQTPGKEREFVAA | |
| | | ISWSGTYYTDSVKGRFTISRDNAKN | |
| | | TVYLQMNSLKPEDTAVYYCAVGSRR | |
| | | LYYSSDINYWGQGTQVTVSS | |
| 698 | NBX03164 | QVQLQQSGGGLVQAGDSLRLSCATS | Cpa |
| | | GRTFSSYTMGWFRQTPGKEREFVAA | |
| | | ISWSGTYYTDSVKGRFTISRDNAKN | |
| | | TVYLQMNSLKPEDTAVYYCVVGSRR | |
| | | LYYSSDINYWGQGTQVTVSS | |
| 699 | NBX03165 | QVQLQESGGGLVQAGDSLRLSCATS | Cpa |
| | | ERTFSRYTMGWFRQTPGKEREFVAA | |
| | | ISWSGTYYTDSVKGRFTISTDNAKR | |
| | | TVYLQMNNLKPEDTAVYYCAQGSRR | |
| | | LYYSSDIDYWGQGTQVTVSS | |
| 700 | NBX03166 | QVQLQESGGGLVQAGGSLRLSCTAS | Cpa |
| | | GFIVNSYWMHWFRQAPGKGLEWVAA | |
| | | ISTNAYSTYYADSVRGRFTTSRANA | |
| | | ENTPYLEMNNLKPEDAALYYCARGG | |
| | | TAQEGGMDYWGQGTLITVSS | |
| 701 | NBX03167 | QVQLQESGGGLVQAGDSLRLSCATS | Cpa |
| | | GHDFSKYTMGWFRQTPGKEREFVAA | |
| | | ISWSGTYYTDSVKGRFTISRDNAKN | |
| | | TVYLQMNSLKPEDTAVYYCAVGSRR | |
| | | LYYSSDIDYWGQGTQVTVSS | |
| 702 | NBX03168 | QVQLQQSGGGLVQAGDSLRLSCATS | Cpa |
| | | GFTFSRYTMGWFRQTPGKEREFVAA | |
| | | ISWSGTYYTDSVKGRFTISRDNAKN | |
| | | TVYLQMNSLKPEDTAVYYCASGSRR | |
| | | LYYSSDIDYWGQGTQVTVSS | |
| 703 | NBX03169 | QVQLQESGGGLVQAGDSLRLSCATS | Cpa |
| | | GRTFSRYTMGWYRQTPGKEREFVAA | |
| | | ISWSGTYYTDSVKGRFTISIDNAKN | |
| | | TVYLQMNSLKPEDTAVYYCASGSRR | |
| | | LYYSSDIDYWGQGTQVTVSS | |
| 704 | NBX03170 | QVQLQQSGGGLVQAGDSLRLSCATS | Cpa |
| | | GRTFSRYTMGWFRQSPGKEREFVAA | |
| | | ISWSGTYYTDSVKGRFTISRDNANN | |
| | | TVYLQMNSLKPEDTAVYYCVVGSRR | |
| | | LYYSSDIDYWGQGTQVTVSS | |
| 705 | NBX03171 | QVQLQQSGGGLVQAGDSLRLSCATS | Cpa |
| | | GRDFSRYTMGWFRQTPGKEREFVAA | |
| | | ISWSGTYYTDSVNGRFTISRDNAKN | |
| | | TVYLQMNSLKPEDTAVYYCAVGSRR | |
| | | LYYSSDIDYWGQGTQVTVSS | |
| 706 | NBX03172 | QVQLQESGGGLVQAGDSRRLSCATS | Cpa |
| | | GGTFSSYTMGWFRQTPGKEREFVAA | |
| | | ISWSGTYYADSVKGRFTISRDNAKN | |
| | | TVYLQMNSLKPEDTAVYYCAVGSRR | |
| | | LYYSSDINYWGQGTQVTVSS | |
| 707 | NBX03173 | QVQLQESGGGLVQAGGSLRLSCAAS | Cpa |
| | | GRTFSSYAMGWFRQAPGKEREFVGA | |
| | | LSGSGATTDYADFVKSRFTISRDNA | |
| | | KNTVYLQMRDLKAEDTAVYYCAASG | |
| | | HFGLRGTYNYEYWGQGTQVTVSS | |
| 708 | NBX03174 | QVQLQESGGELVQAGDSLRLSCAVS | Cpa |
| | | GRTGIKWTMAWFRQAPGKEREFVAR | |
| | | ITWSGDTVYADSMKGRFTISRDNAK | |
| | | NTMYLQMNRLKPEDTAVYTCAADRI | |
| | | YNEDRYYYWGQGTQVTVSS | |
| 709 | NBX03175 | QVQLQESGGGLVQAGGSLRLSCAAS | Cpa |
| | | GSIFRIIAMAWYRQAPGKQRELVAA | |
| | | ITNGGATMYADAVKGRFTISRDTAK | |
| | | NTAYLQMNSLKLEDTAVYYCAADHF | |
| | | GRTPYWGQGTQVTVSS | |
| 710 | NBX03176 | QVQLQESGGGLVQAGDSLRLSCATS | Cpa |
| | | GRTFSSYTMGWFRQTPGKEREFVAA | |
| | | ISWSGTYYTDSVKGRFTISRDNAKN | |
| | | TVYLQMNSLKPADTAVYYCAVGSRR | |
| | | LYYSSDIDYWGQGTQVTVSS | |
| 711 | NBX03177 | QVQLQQSGGGLVQAGGSLRLSCAAS | Cpa |
| | | SRTFSNYAMAWFRQTPGKEREFLAT | |
| | | ISGVTAFTIYADSVKGRFTISRDNA | |
| | | KNTLYLQMNSLKAEDTAVYYCAARQ | |
| | | WNPTMRERDYDYWGQGTEVTVSS | |
| 712 | NBX03179 | QVQLQESGGGLVQTGDSLRLSCATS | Cpa |
| | | GRSFSRYTMGWFRQTPGKEREFVAA | |
| | | ISWSGTYYTDSVKGRFTISRDNAKN | |
| | | TVYLQMNSLKPEDTAIYYCAVGTRR | |
| | | LYYSSDIDYWGQGTQVIVSS | |
| 713 | NBX03180 | QVQLQQSGGGLVQAGDSLRLSCATS | Cpa |
| | | GLTVSRYTMGWFRQTPGKEREFVAT | |
| | | ISWSGTYYTDSVKGRFTISRDDAKN | |
| | | MIYLQMNSLKPEDTAVYYCAAGSRR | |
| | | LHYSSDIDYWGQGTQVTVSS | |
| 714 | NBX03181 | QVQLQESGGGLVQAGDSLRLSCATS | Cpa |
| | | GLTFSRYTMGWFRQTPGKEREFVAA | |
| | | ISWSGTYYSDSVKGRFTISRDNAKN | |
| | | THYLQMNSLKPEDTAVYYCVVGSRR | |
| | | LYYSSDINYWGQGTQVTVSS | |
| 715 | NBX0570 | QVQLQESGGGLVQAGGSLRLSCAAS | NetB |
| | | GTGRRFGYMAWYRQPPGKEREMVAT | |
| | | ISRAGATNYADSVKDRFTISRDNIK | |
| | | NTVYLQMNSLKPDDTAVYYCFASVF | |
| | | DAGTYWGQGTQVTVSS | |
| 716 | NBX0571 | QVQLQESGGGLVQAGGSLRLSCAAS | NetB |
| | | GSIFSINVMGWYRQAPGKQRELVAD | |
| | | ATSGGMTNYADSVKGRFTISRDNAK | |
| | | NTVYLQMNSLKPEDTAVYYCNAAQS | |
| | | RTSRLFPDEYDYWGQGTQVTVSS | |
| 717 | NBX0578 | QVQLQESGGGLVQAGGSLRLSCTAS | CnaA |
| | | GRDFSTYVMGWFRQAPGKEREFVAA | |
| | | SNWNDGGTYYADSVKGRFTISRDNA | |
| | | KNTVYLQMNSLKPEDTAVYFCAARS | |
| | | GGSYTYTGSYHYWGQGTQVTVSS | |
| 718 | NBX0579 | QVQLQESGGGLVQAGGPLRLSCAAS | CnaA |
| | | GRTLYNNAMGWFRQAPGKEREFVAG | |
| | | ISSSGISTDYADSVKGRFTISRDNA | |
| | | KNTVYLQMKSLKSADTALYYCAASR | |
| | | AATVGVTPQEYAYWGPGTQVTVSS | |
| 719 | NBX0580 | QVQLQESGGGLVQPGATLRLSCAVS | CnaA |
| | | GRTISNYGVGWFRQAPGKEREFVGV | |
| | | SWSASSTVYADSMKGRFAISRDNVK | |
| | | NTVSLQMNSLRPEDTAIYYCAMMGA | |
| | | SYCAGYRCHHAAQTYDYWGQGTQVT | |
| | | VSS | |
| 720 | NBX0581 | QVQLQESGGGLVQAGGSLTLSCAAS | CnaA |
| | | GPPSRRYDMGWFRQAPGKEREFVAA | |
| | | VSWTGSSTYYSDSVKGRFTISRDGV | |
| | | KNTVYLQMNSLKSEDTAVYYCAVKN | |
| | | TYGSSSYYYTSSSYDYWGQGTQVTV | |
| | | SS | |
| 721 | NBX0582 | QVQLQESGGGLVQAGGSLRLSCTVA | CnaA |
| | | GEIDSAAGMAWFRQAPGKERELVAA | |
| | | VTWDGGTTRYKDSVKGRFTISRDHA | |
| | | KNTVLLQMNSLKPEDTAVYYCAAGN | |
| | | TGPFNLLYSSAQYLYWGQGTQVTVS | |
| | | S | |
| 722 | NBX0584 | QVQLQESGGGLVQAGGSLRLSCAAS | CnaA |
| | | GSMFSIHDMSWVRQAPGKQREVVAT | |
| | | VSSDGTTNYAESVKGRFTVSRDNAK | |
| | | ITAYLQMNSLKLEDTGVYYCMGNLR | |
| | | RLDSGYADSYYYKTGQGIQVTVSS | |
| 723 | NBX0585 | QVQLQQSGGGLVQAGGSLRLSCAAS | CnaA |
| | | GRTADRYAISWFRQAPGEERDFVAR | |
| | | IERSGGATVYANSVKGRFTISRDNA | |
| | | KNLVYLQMNSLKPEDTAVYYCAARL | |
| | | ALAGEYDYWGQGTQVTVSS | |
| 724 | NBX0586 | QVQLQESGPGLVKPSQTLSLTCTVS | Cpa |
| | | GGSIRTDRYYWSWIRQPPGKGLEWM | |
| | | GAIAWTASTFYNPSLKSRTSISRDT | |
| | | SGNQFTLQLSSVTPEDTAVYYCVPI | |
| | | VGDSSWSGGSWGQGTQVTVSS | |
| 725 | NBX0587 | QVQLQESGGGLVQAGGSLRLSCAVS | Cpa |
| | | GIIFSINAMGWYRQAPGKQREYVAG | |
| | | ITGRGRTNYVDSVKGRFTISRDNAR | |
| | | NTVYLQMNSLKPEDTGVYYCNEARN | |
| | | GLGSPANSWGQGTQVTVSS | |
| 726 | NBX08116 | QVQLQESGGGLVQVGGSLRLSCAAS | NetB |
| | | GSIFSIYTMGWYRQAPGNEREMVAT | |
| | | ITSGGTTNYADSVQGRFTITTSRDN | |
| | | AKNTVYLQMNSLKPEDTAVYSCNAL | |
| | | VNQRDGLATYYWGQGTQVTVSS | |
| 727 | NBX08117 | QVQLQESGGGLVQAGGSLRLSCAAS | NetB |
| | | GSISSISGMGWYRQAPGRQRALVAT | |
| | | ITSYGSTDYEDSVKGRFTISRDNAK | |
| | | NTVYLQMNSLKPEDTGVYYCHAVQG | |
| | | STWWGSGSWGQGTQVTVSS | |
| 728 | NBX08118 | QVQLQQSGGGLVQAGGSHRLSCAAS | NetB |
| | | KSIGSIHRMGWYRQAPGKERELVAI | |
| | | ITNGGSTNHRDSVRGRFTISADVAK | |
| | | NTVYLQMNSLKPEDTAVYYCYANIR | |
| | | EYYSSYEYWGQGTQVTVSS | |
| 729 | NBX08119 | QVQLQESGGGLVRAGDSLTLSCAAS | NetB |
| | | GRTFSSYAMGWFRQAPGKEREFVAA | |
| | | INRSGGTTSYVEPVKGRFTISRDNA | |
| | | KNTVYLQMNSLKPEDTAVYYCAADR | |
| | | VGDDYYYISSQHYDYWGQGTQVTVS | |
| | | S | |
| 730 | NBX08120 | QVQLQESGGGLVQAGGSLRLSCTIS | NetB |
| | | GTRGSINPVAWSRQAPGKQREPIAF | |
| | | ISTGGATIYGDSAKGRFTISRDNAK | |
| | | NTVYLQMSNLKPEDSGVYYCNTESY | |
| | | RGQGTQVTVSS | |
| 731 | NBX08121 | QVQLQQSGGGLVQAGDSLRLSCTAS | NetB |
| | | GRTFNGKGMAWFRQAPGKEREFVAG | |
| | | INWSGDSTSYGDSVKGRFTISRDDA | |
| | | KNTVYLQMNSLKLEDTAVYYCAVST | |
| | | YSTYWFTPARYDYWGQGTQVTVSS | |
| 732 | NBX08122 | QVQLQESGGGLVQAGGSLRLSCLAS | NetB |
| | | GMTFSDHAMGWYRQAPGKQRELVAI | |
| | | IGRGGTTTYFDSVKGRFTISKDNAK | |
| | | NTLYLQMNSLKPEDTAVYYCNVVPL | |
| | | RAGIDTYWGQGTQVTVSS | |
| 733 | NBX08123 | QVQLQESGGGLVQAGGSLRLSCAAS | NetB |
| | | GSGRRVGYMAWYRQTPGKQRELVAT | |
| | | ISRAGATKYEDSVKDRFTISRDNAK | |
| | | NTVYLQMNSLKPDDTAVYYCFASII | |
| | | DAGTYWGQGTQVTVSS | |
| 734 | NBX08124 | QVQLQESGGGLVEPGGSLRLSCAAS | NetB |
| | | GIISSITYMGWYRQAPGKQRELVAL | |
| | | IARSGATRYADSVKDRFTISRDDAK | |
| | | NTVYLQMNNLKAEDTALYYCYIDQR | |
| | | DVVPTWGQGTQVTVSS | |
| 735 | NBX08125 | QVQLQESGGGLVQPGGSLRLSCAAS | NetB |
| | | QSIFRINAMGWYRHTPGKPRELVAL | |
| | | ITSGGVTTYADYVKGRFTISGDNAK | |
| | | NTVYLQMNSLKPEDTAVYECHARSW | |
| | | SADYWGQGTQVTVSS | |
| 736 | NBX08126 | QVQLQQSGGGLVQTGGSLRLSCAAS | NetB |
| | | GIMLRDEALGWYRQAPGRQREMVAI | |
| | | ITRGGATNYFGSVKGRFTISRDNAK | |
| | | NTVYLQMNSLKPEDTAVYFCRIIGT | |
| | | DTWGQGTQVTVSS | |
| 737 | NBX08127 | QVQLQESGGGLVQPGGSLRLSCAAS | NetB |
| | | GDTISSYTMAWFRQAPGKDREFVAS | |
| | | ITWSGEVTYYADSVKGRFTISRDNA | |
| | | KNTLYLQMNSLKPEDTAVYYCAAGR | |
| | | AGTNWNYWGQGTQVTVSS | |
| 738 | NBX08128 | QVQLQESGGGLVQAGGSLRLSCAAS | NetB |
| | | RIISSITDMGWYRQPPGQRELVASI | |
| | | SRGGRIDYADSVKGRFSISRDNAQN | |
| | | AVYLQMNSLKPEDTDVYYCSALSSG | |
| | | KYYWGQGTQVTVSS | |
| 739 | NBX08129 | QVQLQESGGGPVQAGGSLRLSCAAS | NetB |
| | | APLNSIHAMRWFRQVPGKQREMVAT | |
| | | STNGGSTNYHESVKGRFTISRDNAK | |
| | | NAVYLEMNSLKPEDSAVYYCYAEVR | |
| | | HYSGNVDQYWGQGTQVTVSS | |
| 740 | NBX08138 | QVQLQQSGGGLVQAGGSLRLSCAAS | CnaA |
| | | GRIFGINGWYWYRQAPGKRRELVAS | |
| | | LYRSGGTNYLDSVKGRFIISRDNAK | |
| | | NTVYLQMNDLKPEDTAVYYCNVNWA | |
| | | ESDSWGQGTQVTVSS | |
| 741 | NBX08139 | QVQLQESGGGSVQAGGSLRLSCAAS | CnaA |
| | | RGTFSNLGLAWFRQAPGKEREFVAA | |
| | | LKRDGNRTYYADSMKGRFTISRDNA | |
| | | KNTVYLQMNSLKPEDTAVYYCAARL | |
| | | PRPNAVVDTTSEYDYWGQGTQVTVS | |
| | | S | |
| 742 | NBX08140 | QVQLQESGGGLVQAGGSVRLSCVAS | CnaA |
| | | GRTFNMAWFRQGPGNEREFVASISG | |
| | | SGGITHVADSVKGRFTISRDTDKNT | |
| | | LYLHMDSLKPEDTAVYYCAVARFGG | |
| | | AWVYGGQGTQVTVSS | |
| 743 | NBX08141 | QVQLQQSGGGLVQPGGSLRLSCAAS | CnaA |
| | | GRTFSDLGMGWFRQAPGKEREFVAQ | |
| | | ILSGTTRPVYGDSVEGRFTISTDSA | |
| | | KNTVYLRMNRLEPEDTAVYYCAART | |
| | | VGGLPIWGPGTQVTVSS | |
| 744 | NBX08142 | QVQLQESGGGLVQAGGSLRLSCTAS | CnaA |
| | | DTIFSSNGMYWYRQALGKRRELVAS | |
| | | LYRDGNTAYADSVKGRFTISRDNAK | |
| | | NMVWLQMNSLKPEDTAVYYCNINWP | |
| | | LHDSWGQGTQVTVSS | |
| 745 | NBX08143 | QVQLQESGGGSVQAGDSLRLSCAVS | CnaA |
| | | RGTFNNYGLAWFRQAPGKEREFVAS | |
| | | LTRLGGRTYYADSVKGRFTISRDNA | |
| | | KNTVYLQMNSLKPEDTAVYYCAARL | |
| | | PRTNAVVDDISEYTYWGHGTQVTVS | |
| | | S | |
| 746 | NBX08144 | QVQLQQSGGGSVQAGGSLRLSCAAS | CnaA |
| | | RGTFNNLGMAWFRQAPGKEREFVAA | |
| | | LKRDGIRTYYGDSMKGRCTISRDNA | |
| | | KITVYLQMNSLKSEDTAVYYCAARL | |
| | | PRTNAVVDSTSEYDYWGQGTQVTVS | |
| | | S | |
| 747 | NBX08145 | QVQLQQSGGGLVQAGGSLRLSCAAS | CnaA |
| | | GRIFGINGWYWYRQAPGKRRELVVS | |
| | | LYRSGGTNYLDSVKGRFIISRDNAK | |
| | | NTVYLQMNDLKPEDTAVYYCNVNWA | |
| | | ESDSWGQGTQVTVSS | |
| 748 | NBX08149 | QVQLQESGGGLVQAGGSLRLSCVAS | NetB |
| | | GSPLSINVMGWYRQTPGKQRELVAS | |
| | | ITSGGQTRYAESVKGRFTISRDGGK | |
| | | NTVVLQMNSLNFEDAAVYYCNARDA | |
| | | TYYVEYNYWGQGTQVTVSS | |
| 749 | NBX08150 | QVQLQESGGGLVQAGGSLRLSCAAS | NetB |
| | | ARTFSDYAMGWFRQPPGEGREFVAG | |
| | | IRENGGRTEYADSVKGRFTVSRDNV | |
| | | KNTMYLQMNNLKPDDTAIYYCAAGR | |
| | | DRYLRFSPDYWGQGTQVTVSS | |
| 750 | NBX08151 | QVQLQQSGGGLVQAGGSLRLSCAVS | NetB |
| | | GTIGSINPVAWSRQAPGKQREPIAF | |
| | | ISTAGATIYGDSAKGRFTISRDNAK | |
| | | NTVYLQMSNLKPEDSAVYYCNTESY | |
| | | RGQGTQVTVSS | |
| 751 | NBX08152 | QVQLQESGGGPVQAGGSLRLSCAYS | NetB |
| | | GRTFSGYGMGWFRQAAGKERTWVGT | |
| | | ITWNEGSTYYARSVRGRFTISRDNA | |
| | | KNTVYLQMDSLKPEDTAVYYCAAST | |
| | | AGYGLGSSPNEYEYWGQGTQVTVSS | |
| 752 | NBX08153 | QVQLQESGGGLVQAGDSLRLSCTAS | NetB |
| | | GRTFTRYGMGWFRQAPGKEREFVAG | |
| | | INGRGDSTSYGDSVKGRFTISRDDA | |
| | | KNTVYLQMNSLKLEDTAVYYCAVSF | |
| | | TSTFWFSPAQYDYWGQGTQVTVSS | |
| 753 | NBX08154 | QVQLQESGGGLVQAGGSLRLSCAVS | NetB |
| | | GSLFSFETMRWYRQAHGKQREWVAI | |
| | | ITTGASPAYADSVKGRFTISRDNAK | |
| | | NTVYLQMFSLKPEDTAVYYCYVRER | |
| | | VGSKEYWGQGTQVTVSS | |
| 754 | NBX08155 | QVQLQESGGGLVQPGGSLRLSCAAS | NetB |
| | | GLIFSASPMGWYRQAPGNQREFVAR | |
| | | ISASGMITKYADSVKGRFTVSRDDA | |
| | | KNTVYLQMNNLKPEDTAVYYCNAPR | |
| | | ANSDWPRENSWGQGTQVTVSS | |
| 755 | NBX08156 | QVQLQQSGGGLVQPGGSLRLSCAAS | NetB |
| | | GFTLSSYYIGWFRQAPGKEREGVSC | |
| | | FSNSDGNIAFADSVKGRFTVSRDNA | |
| | | KRMVYLQMTSLKLEDTAVYYCAVGY | |
| | | ACDYHELRQRFSSWGQGTQVTVSS | |
| 756 | NBX08157 | QVQLQQSGGGLVQPGGSLRLSCAAS | NetB |
| | | RSISSIQAMGWYRQAPGKORELVAR | |
| | | ITNGGTTRYADSVRGRFTISRDNAK | |
| | | NTVYLQMNSLKPEDTAVYYCNADER | |
| | | PYYGDAINSWGHGTQVTVSS | |
| 757 | NBX11001 | QVQLQQSGGGLVQPGGSLRLSCAAS | CnaA |
| | | GFAFDTSPMRWARQAPGKGLEWVST | |
| | | IFSDGSTHYVDSVKGRFTISRDNAK | |
| | | NMVFLQMNSLKTEDTAVYYCAMSGV | |
| | | RGQGTQVTVSS | |
| 758 | NBX11002 | QVQLQQSGGGLVQPGGSLRLSCAAS | CnaA |
| | | GFTLDTYAVGWFRQAPGKEREEVSC | |
| | | ISASGSMTTYAPFVKGRFTISKNNV | |
| | | RNMVDLQMNSLKPEDTAVYYCAAST | |
| | | RPLCSRGGNYDYWGQGTQVTVSS | |
| 759 | NBX11003 | QVQLQESGGGLVQPGGSLRLSCAAS | CnaA |
| | | GFTLDYSAIGWFRQAPGKEREDVSC | |
| | | ISSSGAYTSYVGSVKGRFSISRDNA | |
| | | KNTVFLQMNSLKPEDTAVYYCAARS | |
| | | GVCSRSSSDFGSWGQGTQVTVSS | |
| 760 | NBX11004 | QVQLQQSGPGLVKPSQTLSLTCTVS | CnaA |
| | | GGSITTNPYYWSWIRQPPGKGLEWI | |
| | | GYIDYSGSTYYSPSLRSRTTISRDT | |
| | | SKNQFTLQLSSVTPGDTAVYYCARS | |
| | | LRPVVTAKRDDEYWGQGTQVTVSS | |
| 761 | NBX11005 | QVQLQESGGGLVQPGGSLRLSCAAS | CnaA |
| | | GSIFSINAMGWFRQAPRKEREFVAT | |
| | | INWSGGITYYADSVKGRFTISRDNA | |
| | | KNTVYLQMNSLKPDDTAIYYCAADL | |
| | | RVGASGPISFAWAYDYWGQGTQVTV | |
| | | SS | |
| 762 | NBX11006 | QVQLQESGGGLVQPGGSLRLSCAAS | CnaA |
| | | GFSLDNYDIGWFRQAPGKEREGVGC | |
| | | ISRSGGTTTYAGSVSRRFTISRDNA | |
| | | KNTVYLQMNSLKPEDTGVYYCAPVD | |
| | | ITGPGRCPPARYEYGYWGQGTQGTA | |
| | | SS | |
| 763 | NBX11007 | QVQLQQSGGGLVQPGGSLRLSCAAS | CnaA |
| | | GFAFDRSAMRWARQAPGKGLEWVSS | |
| | | IFSDGSTHYVPSVEGRFTISRDNPK | |
| | | NMVYLQMNSLKPEDTAVYYCATSGI | |
| | | RGQGTQVTVSS | |
| 764 | NBX11008 | QVQLQESGGGLVQPGESLRLSCAAS | CnaA |
| | | GFAFDSSAMRWARQAPGKGLEWLCS | |
| | | IFKDGSTYYVDSVKGRFTISRDNAK | |
| | | NMVYLQMNSLKPEDTAVYYCATSGI | |
| | | RGQGTQVTVSS | |
| 765 | NBX11009 | QVQLQESGGGLVQAGGSLRLSCAAS | CnaA |
| | | GIGPNAIGWFRQAPGKERDFVAGIS | |
| | | RSGGYTNYAASVKDRFTISRDDAKN | |
| | | TVYLQMTNLSPEDTAIYTCAADAGN | |
| | | FPSRNPVTYGYWGQGTQVTVSS | |
| 766 | NBX11010 | QVQLQQSGGGLVQPGGSLRLSCAAS | CnaA |
| | | GFAFDRSPMRWARQAPGKGLEWISS | |
| | | IFSDGSTYYVDSVEGRFTISRDNDK | |
| | | NMVYLQMNSLKPEDTAVYYCATSGI | |
| | | RGQGTQVTVSS | |
| 767 | NBX11011 | QVQLQESGGGLVQPGGSLRLSCAAS | CnaA |
| | | GFTLDYYAIGWFRQAPGKEREGVSC | |
| | | ISSSGAYENYAGFVKGRFTISRDNA | |
| | | KNTVYLQMNNLKPEDTAVYYCAAAR | |
| | | GGCPPNTYYSGSSYFWEYDFWGQGT | |
| | | QVTVSS | |
| 768 | NBX11012 | QVQLQESGGGLVQPGGSLRLSCAAS | CnaA |
| | | GFNLNYYDIGWFRQAPGKEREGVSC | |
| | | ISRSGGTETYAPSVKGRFTISRDNA | |
| | | KNTVYLQMNSLEPEDTGVYYCAPVD | |
| | | ITGPGRCPPARYAYGSWGQGIQVTV | |
| | | SS | |
| 769 | NBX11013 | QVQLQESGGGLVQPGESLRLSCAAS | CnaA |
| | | GFAFDSSPMRWARQAPGKGLEWLCS | |
| | | IFKDGSTYYVDSVKGRFTISRDNAK | |
| | | NMVYLQMNSLKPEDTAVYYCATSGI | |
| | | RGQGTQVTVSS | |
| 770 | NBX11014 | QVQLQESGGGLVQPGESLRLSCAAS | CnaA |
| | | GFAFDSSPMRWARQAPGKGLEWMCT | |
| | | IFKDGTTYYVDSVKGRFTISRDNAK | |
| | | NMVYLQMNSLKPEDTAVYYCAMSGV | |
| | | RGQGTQVTVSS | |
| 771 | NBX11015 | QVQLQQSGGGLVQPGESLRLSCAAS | CnaA |
| | | GFAFDTSPMRWARQAPGKGLEWLCS | |
| | | IFKDGSTYYVDSVKGRFTISRDNAK | |
| | | NMVYLQMNSLKPEDTAVYYCATSGI | |
| | | RGQGTQVTVSS | |
| 772 | NBX11016 | QVQLQQSGGGLVQPGGSLRLSCAAS | CnaA |
| | | GFNLDNYHIGWFRQAPGKEREGVSC | |
| | | ISSSGGLTTYAPFVKGRFTISRDNA | |
| | | KNTVFLQMSSLKPEDTAVYYCGRVN | |
| | | YCARDMSAYDTWGQGTQVTVSS | |
| 773 | NBX11017 | QVQLQQSGGGLVQPGGSLRLSCAAS | CnaA |
| | | GFTRDYYTIGWFRQAPGKEREGVSC | |
| | | ISSSDGWTYYADSVKGRFTISRDNA | |
| | | KNTVYLQMNSLKPEDTAVYYCAAAY | |
| | | DTAGWGAGGMDYWGKGTLVTVSS | |
| 774 | NBX11018 | QVQLQQSGGGLVQAGGSLRLSCAAS | CnaA |
| | | GSIFSINAMGWFRQAPGKEREFVGA | |
| | | ITWSGGSTEYADHVKGRFTISRDNA | |
| | | KNTVYLQMNSLKPEDTAIYYCAADT | |
| | | RRWAGGSSWYGEEYDYWGQGTQVTV | |
| | | SS | |
| 775 | NBX11019 | QVQLQQSGGGLVQPGGSLRLSCEAS | CnaA |
| | | GFTLDYYTIGWFRQAPGKEREEVSC | |
| | | ISRSGAMTTYAGSVKGRFTISRDNA | |
| | | KKTVYLQMNSLKPEDTGIYYCAATV | |
| | | KSVCFRGELYDYWGQGTQVTVSS | |
| 776 | NBX11020 | QVQLQESGGGVVQPGGSLRLSCAAS | CnaA |
| | | EFSLANYAIGWFRQAPGKEREAVSC | |
| | | ISSSGNYMTYEPFVKGRFTISRDNA | |
| | | KNAVYLQMNSLEPEDTAVYYCARAR | |
| | | SGCSRNMYDSTDYWGQGTQVTVSS | |
| 777 | NBX11021 | QVQLQQSGGGLVQPGGSLTLSCAAS | CnaA |
| | | GFTLDYYAIGWFRQAPGKEREGVSC | |
| | | ISSSDGSTYYADSVKGRFTISRDNA | |
| | | KNTVYLQMNSLKPEDTAVYYCAAIG | |
| | | SGPLTAQGMCVMTRTPRDYDYWGQG | |
| | | TQVTVSS | |
| 778 | NBX11022 | QVQLQESGGGLVQPGGSLRLSCAAS | CnaA |
| | | GFAFDRSPMRWARQAPGKGLEWVSS | |
| | | SLPDGSTYYIDSVKGRFTISRDNVK | |
| | | NMVYLQMNSLKPEDTAVYYCATSGV | |
| | | RGQGTQVTVSS | |
| 779 | NBX11023 | QVQLQQSGGGLVQPGGSLRLSCAAS | CnaA |
| | | GFAFDRSAMRWARQAPGKGLEWVSS | |
| | | IFSDGTTHYVPSVEGRFTISRDNPK | |
| | | NMVYLQMNSLKPEDTAVYYCATSGI | |
| | | RGQGTQVTVSS | |
| 780 | NBX11024 | QVQLQESGGGLVQLGGSLRLSCAAS | CnaA |
| | | GFTFDSYVMTWVRQAPGKGLEWVSY | |
| | | ISQGGGATYYADSVKGRFTISRDNN | |
| | | KNTLYLQMNSLKPEDTAVYYCAKGG | |
| | | LADGTGFYGSPGALIRGQGTQVTVS | |
| | | S | |
| 781 | NBX11025 | QVQLQESGGGLVQPGGSLRLSCVAS | CnaA |
| | | GFTFNTYVMTWVRQAPGKGLEWVSY | |
| | | ISQGGAATYYTDSVKGRFTISRDNA | |
| | | KNTVYLQMNSLKPEDTAVYYCAQGG | |
| | | LADGSGFYGSPGALIRGQGTQVTVS | |
| | | S | |
| 782 | NBX11026 | QVQLQESGGGLVQPGGSLRLSCAAS | CnaA |
| | | GFTLDYYAIGWFRQAPGKEREGVSC | |
| | | IMSSDGYTYYADSVKGRFTISRDNA | |
| | | KNTVYLQMNSLKPEDTAVYYCAAAY | |
| | | DTAGWGADGMDYWGKGTLVTVSS | |
| 783 | NBX11027 | QVQLQESGGGLVQPGESLRLSCAAS | CnaA |
| | | GFAFDTSPMRWARQAPGKGLEWLCS | |
| | | IFEDGTTYYVDSVKGRFTISRDNAK | |
| | | NMVYLQMNSLKPEDTAVYYCATSGI | |
| | | RGQGTQVTVSS | |
| 784 | NBX11028 | QVQLQESGGGLVQPGGSLRLSCAAS | CnaA |
| | | GSIFSINGMGWFRQAPGKEREFVAA | |
| | | ISWSGSITYYADSVKGRFTISRDNA | |
| | | KNTVLLQMNSLKPEDTAIYYCAADI | |
| | | RVGASGPISFAWAYDYWGQGTQVTV | |
| | | SS | |
| 785 | NBX11029 | QVQLQESGGGLVQPGGSLRLSCAAS | CnaA |
| | | GFILDYYAIGWFRQAPGKEREGVSC | |
| | | ISSSDGSTYYADSVKGRFTISRDNA | |
| | | KNTVYLQMNSLKPEDTAVYYCAAVG | |
| | | SGPLSAQGMCVMTRTSRDADYWGQG | |
| | | TQVTVSS | |
| 786 | NBX11032 | QVQLQESGGGLVQPGGSLRLSCLAS | CnaA |
| | | GFTLDGYAIGWFRQAPGKEREGVSC | |
| | | ISPSGGMTTYAGFVKGRFTISRDNA | |
| | | KNTVYLQMNSLKPEDTGVYYCKVMP | |
| | | LCDRMWSPLGGSWGQGTQVTVSS | |
| 787 | NBX11033 | QVQLQESGGGLVQPGGSLRLSCAAS | CnaA |
| | | GFTLEAYAIGWFRQAPGKEREEVSC | |
| | | ISRSGGLTTYAGFVKGRFTISRDNA | |
| | | KNTAYLQMNSLNPEDTALYYCAAKQ | |
| | | TQCSRWNPEYEYWGQGTQVFVSS | |
| 788 | NBX11034 | QVQLQESGGGLVQPGGSLKLSCAAS | CnaA |
| | | GFTFEASAMRWARQAPGKGLEYVSS | |
| | | IFSDGTTYYVDSVKGRFTISRDNDK | |
| | | NMVYLQMNNLKPEDTAVYYCATSGI | |
| | | RGRGTQVTVSS | |
| 789 | NBX11035 | QVQLQESGPGLVKPSQTLSLTCTVS | CnaA |
| | | GGSITTNSYYWSWIRQPPGKGLEWI | |
| | | GYIDYSGSTYYSPSLRSRTTISRDT | |
| | | SKNQFTLQLSSVTPGDTAVYYCARS | |
| | | LRPVVTAKRDDEYWGQGTQVTVSS | |
| 790 | NBX11036 | QVQLQESGGGLVQLGGSLRLSCAAS | CnaA |
| | | GFTFDAYVMTWVRQAPGKGLEWVSY | |
| | | ISQGGAATYYADSVKGRFTISRDNN | |
| | | KNTLYLQMNSLKPEDTAVYYCAKGG | |
| | | LADGSGFYGSPGALIRGQGTQVTVS | |
| | | S | |
| 791 | NBX11037 | QVQLQESGGDLVQPGGSLRLSCAAS | CnaA |
| | | GFAFEASAMRWARQAPGKGLEYVSS | |
| | | IFSDGTTYYVDSVKGRFTISRDNDK | |
| | | NMVYLQMNNLKPEDTAVYYCATSGI | |
| | | RGRGTQVTVSS | |
| 792 | NBX11038 | QVQLQESGPGLVKPSQTLSLTCTVS | CnaA |
| | | GGSITTNSYYWSWIRQPPGKGLEWI | |
| | | GYIDYSGNTYYSPPLRSRTSISRDT | |
| | | SKNQFTLQLSSVTPEDTAVYYCARS | |
| | | VRPVVTAKGDNEYWGQGTQVTVSS | |
| 793 | NBX11039 | QVQLQESGGGLVQPGGSLRLSCAAS | CnaA |
| | | GFAFDTSPMRWARQAPGKGLEWVST | |
| | | SFSDGTTHYVDSVKGRFTISRDNAK | |
| | | NMVYLQMNSLKPEDTAVYYCATSGI | |
| | | RGQGTQVTVSS | |
| 794 | NBX11040 | QVQLQESGPGLVKPSQTLSLTCTVS | CnaA |
| | | GGSITTNTYYWSWIRQPPGKGLEWI | |
| | | GYIDYSGSTYYSPSLRSRTTISRDT | |
| | | SKNQFTLQLSSVTPEDTAVYYCARS | |
| | | VRPVVTAKSDDEYWGQGTQVTVSS | |
| 795 | NBX11041 | QVQLQESGPGLVKPSQTLSLTCTVS | CnaA |
| | | GGSITTNSYYWSWIRQPPGKGLEWI | |
| | | GYIDYSGNTYYSPPLRSRTSISRDT | |
| | | SKNQFTLQLSSVTPEDTAVYYCARS | |
| | | VRPVVTAKSDNEYWGQGTQVTVSS | |
| 796 | NBX11042 | QVQLQESGPGLVKPSQTLSLTCTVS | CnaA |
| | | GGSITTNSYYWSWIRQPPGKGLEWI | |
| | | GYIDYSGNTYYSPPLRSRTSISRDT | |
| | | SKNQFTLQLSSVTPEDTAVYYCARS | |
| | | VRPVVTAKRDNEYWGQGTQVTVSS | |
| 797 | NBX11043 | QVQLQESGGGLVQPGGSLRLSCAAS | CnaA |
| | | GFAFDSSAMRWARQAPGKGLEWVSS | |
| | | ILSDGSTYYVDSVKGRFTISRDNVK | |
| | | NMVYLQMNSLKPEDTAVYYCATSGI | |
| | | RGQGTLVTVSS | |
| 798 | NBX11044 | QVQLQESGGGLVQPGESLRLSCAAS | CnaA |
| | | GFAFDSSPMRWARQAPGKGLEWLCS | |
| | | IFGDGSTYYVDSVKGRFTISRDNAK | |
| | | NMVYLQMNSLKPEDTAVYYCAMSGV | |
| | | RGQGTQVTVSS | |
| 799 | NBX11045 | QVQLQESGGGLVQPGGSLRLACVGS | CnaA |
| | | GFTLDYYDIGWFRQAPGKEREGVSC | |
| | | IEGSGGSTNYADSVKGRFTISRDNA | |
| | | KNTVYLQMNSLKPDDTAVYYCAVAS | |
| | | SGSIGLCTVGRNAYNYWGQGTQVTV | |
| | | SS | |
| 800 | NBX11046 | QVQLQESGGGLVQPGRSLRLSCVAS | CnaA |
| | | GISRNAIGWFRQAPGKERDFVAGIS | |
| | | RSGGYTNYENFVKGRFTISRDDAKN | |
| | | TVYLQMTNLKPEDTAIYTCAADAGN | |
| | | FPSRNPVTYGYWGQGTQVTVSS | |
| 801 | NBX11047 | QVQLQQSGGGLVQPGGSLRLSCAAS | CnaA |
| | | GFTLDYYAIGWFRQAPGKEREGVSC | |
| | | ISSSDGSTYYADSVKGRFTISRDNA | |
| | | KNTVYLQMNSLKPEDTAVYYCAAVG | |
| | | SGPLSAQGMCVMTRTPRDYDYWGQG | |
| | | TQVTVSS | |
| 802 | NBX11048 | QVQLQESGGGLVQPGESLRLSCAAS | CnaA |
| | | GFAFDSSAMRWARQAPGKGLEYVCS | |
| | | IFEDGSTYYVDSVKGRFTISRDNAK | |
| | | NMVYLQMNSLKPEDTAVYYCTTSGI | |
| | | RGQGTQVTVSS | |
| 803 | NBX11049 | QVQLQQSGPGLVKPSQTLSLTCTVS | CnaA |
| | | GGSITTNHYYWSWIRQPPGKGLEWI | |
| | | GYIDYSGSTYYSPPLRSRTSISRDT | |
| | | SKNQFTLQLSSVTPEDTAVYYCARS | |
| | | VRPVVTAKRDDENWGQGTQVTVSS | |
| 804 | NBX11050 | QVQLQESGGGLVQPGESLRLSCAAS | CnaA |
| | | GFAFDKSAMRWARQAPGKGLEYVCS | |
| | | VFEDGSTYYVDSVKGRFTISRDNAK | |
| | | NMVYLQMNSLKPEDTAVYYCTTSGI | |
| | | RGQGTQVTVSS | |
| 805 | NBX11051 | QVQLQESGGGLVQPGGSLRLSCAAS | CnaA |
| | | GFTLEAYDIGWFRQAPGKEREEISC | |
| | | ISRSAGHTTYAGFVKGRFTISRDNA | |
| | | KNTAYLQMNSLNPEDTALYYCAAGQ | |
| | | TQCTRWSSEYEYWGQGTQVTVSS | |
| 806 | NBX11052 | QVQLQESGGGLVQPGESLRLSCAAS | CnaA |
| | | GFTFDRSPMRWARQAPGKGLEYLCT | |
| | | IFEDGTTYYVDSVKGRFTISRDNAK | |
| | | NMVYLQMNNLKPEDTAVYYCAMSGV | |
| | | RGQGTQVTVSS | |
| 807 | NBX11053 | QVQLQESGGGLVQPGGSLRLSCAAS | CnaA |
| | | GFTLENYAIGWFRQAPGKEREGVSC | |
| | | ISASGSTTTYEGFVKGRFTISRDNA | |
| | | KNTIYLQMNALEPEDTAVYYCARTH | |
| | | QLCPRARSPYDAWGQGTQVTVSS | |
| 808 | NBX11054 | QVQLQESGGGLVQPGGSLRLSCAAS | CnaA |
| | | GFTLDYYTIGWFRQAPGKEREGVSC | |
| | | IMTSDDYTYYADSVKGRFTISRDSA | |
| | | TNTVYLQMNSLKPEDTAVYYCAAAY | |
| | | DTAGWGADGMDYWGKGTLVTVSS | |
| 809 | NBX21001 | QVQLQESGGGLVQPGGSLRLSCAAS | NetB |
| | | GSIFSIKDMGWYRQPPGKQRELVAR | |
| | | ITTGGTTTYADSVKGRFTISRDNAK | |
| | | NTVYLQMNNLKPEDTDVYYCGVLLN | |
| | | YRGPSSASYHWGQGTQVTVSS | |
| 810 | NBX21002 | QVQLQESGGGLVQPGGSLRLSCAAS | NetB |
| | | RSIFSINVMGWYRQAPGKQRELVAH | |
| | | ITRGGSTYYYVDSVKGRFTISRDNA | |
| | | KTMVYLQMNSLKPEDTAVYYCNAVP | |
| | | ARDRWGQGTQVTVSS | |
| 811 | NBX21003 | QVQLQESGGGLVQPGGSLRLSCAAS | NetB |
| | | GFTFSRAAMIWVRQAPGKGLEWVSV | |
| | | IDSDGGTTRYADSVKGRFTISRDNA | |
| | | KNTLYLQMNNLKPEDTAVYYCSLFR | |
| | | GYSAYDLRSPGQGTQVTVSS | |
| 812 | NBX21004 | QVQLQESGGGLVQPGGSLRLSCAAS | NetB |
| | | RSIVSDNVMGWYRQAPGKQRELVAH | |
| | | ITRGGSTYYFVDSVKGRFTISRDNA | |
| | | KTMVYLQMNSLKPEDTAVYYCNTVP | |
| | | ARDRWGQGTQVTVSS | |
| 813 | NBX21005 | QVQLQESGGGLVQAGGSLRLSCAAS | NetB |
| | | GRTFSRYGMGWFRQAPGKDREFVAA | |
| | | ISWSGDSTYYADSVKGRFTISRDNA | |
| | | KNTVYLQMNSLKPEDTAVYYCAASY | |
| | | NPGTIATIRREYEYDYWGQGTQVTV | |
| | | SS | |
| 814 | NBX21006 | QVQLQESGGGLVQAGGSLRLSCAAS | NetB |
| | | GRTYSSYAMGWFRQAPGKEREFVAA | |
| | | ISWSGGSTYYADSVKGRFTISRDNA | |
| | | KNTVYLQMNSLKPEDTAVYYCAADR | |
| | | RTHVSDRLGEYDYWGQGTQVTVSS | |
| 815 | NBX21007 | QVQLQESGGGLVQPGGSLRLSCAAS | NetB |
| | | GRTFSSYAMGWFRQAPGKEREFVAA | |
| | | ISWSDEDTYYADSVKGRFTISRDNA | |
| | | ENTVYLQMNSLKPEDTAVYYCAADR | |
| | | SYTVMVRQMRGMDYWGKGTLVTVSS | |
| 816 | NBX21008 | QVQLQESG*GLVQPGGSLRLSCAAS | NetB |
| | | RSIVSINVMGWYRQAPGKQRELVAH | |
| | | ITRGGSTYYYVDSVKGRFTISRDNA | |
| | | KTMVYLQMNSLKPEDTAVYYCNTVP | |
| | | ARDRWGQGTQVTVSS | |
| 817 | NBX21009 | QVQLQESGGGLVQPGGSLRLSCAAS | NetB |
| | | RSIFSINVWGWYRQAPGKQRELVAH | |
| | | ITRGGSTYYYVDSVKGRFTISRDNA | |
| | | KTMVYLQMNSLKPEDTAVYYCNTVP | |
| | | ARDHWGQGTQVTVSS | |
| 818 | NBX21010 | QVQLQQSGGGLVQAGGSLRLSCAAS | NetB |
| | | GRTFSRYGMGWFRQAPGKEREFVAA | |
| | | ISWSGDSTYYADSVKGRFTISRDNA | |
| | | KNTVYLQMNSLKPEDMGVYYCAASY | |
| | | NPGNIATIRREYEYDYWGQGTQVTV | |
| | | SS | |
| 819 | NBX21011 | QVQLQESGGGLVQAGGSLRLSCAAS | NetB |
| | | GRTFSRYGMGWFRQAPGKEREFVAA | |
| | | ISWSGGSTYYADSVKGRFTISRDNA | |
| | | KNTVYLQMNSLKPEDTAVYYCAASY | |
| | | NPGNIATISREYEYDYWGQGTQVTV | |
| | | SS | |
| 820 | NBX21012 | QVQLQESGGGLVQAGGSLRLSCAAS | NetB |
| | | GRTFSRYGMGWFRQAPGKEREFVAA | |
| | | ISWSGGSTYYADSVKGRFTISRDNA | |
| | | KNTVYLQMNSLKPEDTAVYYCAASY | |
| | | NPGTIATIRREYEYDYWGQGTQVTA | |
| | | SS | |
| 821 | NBX21013 | QVQLQQSGGGLVQAGGSLRLSCAAS | NetB |
| | | GRTFSSYAMAWFRQAPGKEREFVAA | |
| | | IRSGNSTYYADSVKGRFTISRDNAK | |
| | | NTVYLQMNSLKPEDTAVYYCAADVV | |
| | | THLATRFYEYDYWGQGTQVTVSS | |
| 822 | NBX21014 | QVQLQESGGRLVQAGGSLRLSCAAS | NetB |
| | | GRTFSSYAMGWFRQAPGKEREFVAL | |
| | | ISWSGGSTYYADSVKGRFTISRDNA | |
| | | KNTVYLQMNSLKPEDTAVYYCAADR | |
| | | LTHYSDYPADFGSWGQGTQVTVSS | |
| 823 | NBX21015 | QVQLQQSGGGLVQAGGSLRLSCAAS | NetB |
| | | GRTFSSYAMGWFRQAPGKEREFVAL | |
| | | ISWSGSNTYYADSVKGRFTISRDNA | |
| | | KNTAYLQMNSLKPEDTAVYYCAADR | |
| | | LTHYSDYPADFDSWGQGTQVTVSS | |
| 824 | NBX21016 | QVQLQESGGGLVQPGGSLRLSCAAS | NetB |
| | | RSIFSANVMGWYRQAPGKQRELVAH | |
| | | ITRGSSTYYFLDSVKGRFTISRDNA | |
| | | KNIVYLQMNSLKPEDTAVYYCNLVP | |
| | | ARDRWGQGTQVTVSS | |
| 825 | NBX21023 | QVQLQESGGGLVQPGGSLRLSCAAA | NetB |
| | | GSIFSIRDMGWYRQAPGKQRERELV | |
| | | ATISSGGSTSYADFVKDRFTISRDN | |
| | | AKNTVYLQMNDLRPEDTAIYYCSVL | |
| | | TNPGWNRPLAYFWGQGTQVTVSS | |
| 826 | NBX21024 | QVQLQESGGGLVQAGGSLRLSCAAS | NetB |
| | | GPTFSSYAMYAMAWFRQAPGKQREF | |
| | | VASVSLTDGSKNYRDSVKGRFTISI | |
| | | DNANNTVYLQMNSLKPEDTAVYYCA | |
| | | GDLDSDVGYEHWGQGTQVTVSS | |
| 827 | NBX21025 | QVQLQESGGGLVQAGGSLRLSCAAS | NetB |
| | | GRTFSSYAMGWFRQAPGKEREFVAL | |
| | | ISWSGSNTYYADSVKGRFTISRDNA | |
| | | KNTAYLQMNSLKPEDTAVYYCAADR | |
| | | LTHYSDYPADFGSWGQGTQVTVSS | |
| 828 | NBX21026 | QVQLQQSGGGLVQAGGSLRLSCAAS | NetB |
| | | GRTFSRYGMGWFRQAPGKEREFVAA | |
| | | ISWSGGSTYYADSVKGRFTISRDNA | |
| | | KNTVYLQMNSLKPEDTAVYYCAASY | |
| | | NPGNIATIRREYEYDYWGQGTQVTV | |
| | | SS | |
| 829 | NBX21027 | QVQLQQSGGGLVQPGGSLRLSCAAS | NetB |
| | | RSIFSINVMGWYRQAPGKQRELVAH | |
| | | ITRGGSTYYYVDSVKGRFTISRDIA | |
| | | KTMVYLQMNSLKPEDTAVYYCNTVP | |
| | | ARDRWGQGTQVTVSS | |
| 830 | NBX21028 | QVQLQQSGGGSVQAGGSLRLSCAAS | NetB |
| | | GRAFSTYTMGWFRQAPGKEREFVAA | |
| | | ISWTGGSTYYADSVKGRFTISRDNA | |
| | | KAAIYLQMNSLKPEDTAVYYCAEKA | |
| | | RTAVDVRVTSGYDYWGQGTQVTVSS | |
| 831 | NBX21029 | QVQLQESGGGLVQPGGSLRLSCAAS | NetB |
| | | GRIFSINVMGWYRQAPGKQRELVAH | |
| | | ITRGGSTYYFVDSVKGRFTISRDNA | |
| | | KTMVYLQMNSLKPEDTAVYYCNTVP | |
| | | ARDRWGQGTQVTVSS | |
| 832 | NBX21030 | QVQLQESGGGLVQAGGSLRLTCAAS | NetB |
| | | GITFSSYAMSWFRQAPGKEREFVAA | |
| | | ISTSGGSTYYADSVKGRFTISRDNA | |
| | | KNTVYLQMNSLKPEDTAVYYCTARW | |
| | | DYPNTYEYDYSGQGTQVTVSS | |
| 833 | NBX21031 | QVQLQESGGGLVQPGGSLTLSCAAS | NetB |
| | | GGIFSFNVMGWYRQAPGKQRELVAH | |
| | | ITRGGSTYYYVDSVKGRFTISRDNA | |
| | | KTMVYLQMNSLKPEDTAVYYCNTVP | |
| | | ARDRWGQGTQVTVSS | |
| 834 | NBX21032 | QVQLQESGGGLVQAGESLKLSCTEA | NetB |
| | | SGHTFSSYIMGWFRRTPGKQREIVA | |
| | | GIRWSSGTTYYADSVKGRFTISRDN | |
| | | AKNTVYLQMNSLKPEDTAVYYCAAD | |
| | | AGRDSIYDYWGQGTQVTVSS | |
| 835 | NBX21033 | QVQLQESGGGLVQAGGSLRLSCAAS | NetB |
| | | GRTFSSYAMAWFRQAPGKEREFVAV | |
| | | IRSGDSTYYADSVKGRFTISRDNAK | |
| | | NTVYLQMNSLKPEDTAVYYCAADVV | |
| | | THIATRFYEYDYWGQGTQVTVSS | |
| 836 | NBX21034 | QVQLQQSGGGLVQAGGSLRLSCAAS | NetB |
| | | GRTFSSYAMGWFRQAPGKEREFVAL | |
| | | ISWSGASTYYADSVKGRFTISRDNA | |
| | | ENTVYLQMNSLKPDDTAVYYCAADR | |
| | | LTHYSDYPRDFGSWGQGTQVTVSS | |
| 837 | NBX21035 | QVQLQESGGGLVQPGGSLRLSCATS | NetB |
| | | RSIFRENVMGWYRQAPGKQRELVAH | |
| | | ITRGSSTYYFVDSVKGRFTISRDNA | |
| | | KNIVYLQMNSLKPEDTAVYYCNLVP | |
| | | ARDPWGQGTQVTVSS | |
| 838 | NBX21038 | QVQLQESGGGLVQAGGSLRLSCAAS | NetB |
| | | GRTFSMYTMGWFRQAPGKKREFVAT | |
| | | ISGSAGSTYYADSVKGRFTISRDTA | |
| | | KTTVYLQMNILKPEDTAVYYCAASE | |
| | | ATHGTNRQLDYDYWGQGTQVTVSS | |
| 839 | NBX21039 | QVQLQESGGGLVQAGGSLRLSCAAS | NetB |
| | | GGTFSRYGMGWFRQAPGKEREFVAA | |
| | | ISWSGDSTYYADSVKGRFTISRDNA | |
| | | KNTVHLQMNSLKPEDMGVYYCAASY | |
| | | NPGNIATIRREYEYDYWGQGTQVTV | |
| | | SS | |
| 840 | NBX21040 | QVQLQQSGGGLVQAGGSLRLSCAAS | NetB |
| | | GGTFSRYGMGWFRQAPGKEREFVAA | |
| | | ISWSGDSTYYADSVKGRFTISRDNA | |
| | | KNTVYLQMNSLKPEDTAVYYCAASY | |
| | | NPGTIATIRREYEYDYWGQGTQVTV | |
| | | SS | |
| 841 | NBX21041 | QVQLQESGGGLVQAGGSLRLSCVVS | NetB |
| | | RGTFSRYGMGWFRQAPGKEREFVAA | |
| | | ISWSGDSTYYADSVKGRFTISRDNA | |
| | | KNTVYLQMNSLKPEDTAVYYCAASY | |
| | | NPGTIPTIRREYEYDYWGQGTQVTV | |
| | | SS | |
| 842 | NBX21042 | QVQLQESGGGLVQAGGSLRLSCAAS | NetB |
| | | GRTFSRLGMGWFRQAPGKEREFVAA | |
| | | ISWSGDMTYYADSVKGRFTISRDNA | |
| | | KNTVYLQMNSLKPEDTAVYYCGASY | |
| | | NPGTIATIRREYEYDYWGQGTQVTV | |
| | | SS | |
| 843 | NBX21043 | QVQLQESGGGLVQAGGSLRLSCAAS | NetB |
| | | GGTFSRYGMGWFRQAPGKEREFVAA | |
| | | ISWSGDSKYYEDSVKGRFTISRDNA | |
| | | KNTVYLQMNSLKPEDTAVYYCAASY | |
| | | NPGNIATIRREYEYDYWGQGTQVTV | |
| | | SS | |
| 844 | NBX21044 | QVQLQESGGGLVQAGGSLRLSCAAS | NetB |
| | | GGTFSRYGMGWFRQAPGKEREFVAA | |
| | | ISWSGDSTYYADSVKGRFTISRDNA | |
| | | KNTVYLQMNNLKPEDTAVYYCAASY | |
| | | NPGNIATIRREYEYDYWGQGTQVTV | |
| | | SS | |
| 845 | NBX21045 | QVQLQESGGGLVQPGGSLRLSCAAS | NetB |
| | | GSSGSIKDMGWYRQPPGKQRELVAR | |
| | | ISTGGTTTYADSVKGRFTISRDNAK | |
| | | NTVYLQMNNLKPEDTDVYYCSVLLN | |
| | | IRGPSSASYHWGQGTQVTVSS | |
| 846 | NBX21046 | QVQLQQSGGGLVQPGGSLRLSCAAS | NetB |
| | | GSSGSIKDMGWYRQPPGKQRELVAR | |
| | | ITTGGTTTYADSVKGRFTISRDNAK | |
| | | NTVYLQMNNLKPEDTDVYYCNVLLN | |
| | | YRGPSSASYHWGQGTQVTVSS | |
| 847 | NBX21047 | QVQLQESGGGLVQAGGSLRLSCVAS | NetB |
| | | GRSFSSYTMGWFRQAPGKEREFVTS | |
| | | VTWNGEVPYYADSVKGRFTISRDNA | |
| | | KNTVYLRMNSLKPEDSAVYYCAAGN | |
| | | PGRGYDYWGQGTQVTVSS | |
| 848 | NBX21048 | QVQLQESGGGLVQAGGSLRLSCAAS | NetB |
| | | GGTFSRYGMGWFRQAPGKEREFVAA | |
| | | ISWSGGSTYYADSVKGRFTISRDNA | |
| | | KNTVSLQMNSLKPEDTAVYYCAASY | |
| | | NPGNIATIRREYEYDYWGQGTQVTV | |
| | | SS | |
| 849 | NBX21049 | QVQLQESGGGLVQAGGSLRLSCAAS | NetB |
| | | GRTFSNYAMGWFRQAPGKEREFVAA | |
| | | ISRSGGSTYYADSVKGRFTISRDNA | |
| | | KNTVYLQMNSLKPEDTAVYYCAADS | |
| | | LRTHVSDRSYEYDSWGQGTQVTVSS | |
| 850 | NBX21050 | QVQLQESGGGLVQAGGSLRLSCAAS | NetB |
| | | GGTFSRYGMGWFRQAPGKEREFVAA | |
| | | ISWSGDNTYYADSVKGRFTISRDNA | |
| | | KNTVYLQMNSLKPEDMGVYYCAASY | |
| | | NPGNIATIRREYEYDYWGQGTQVTV | |
| | | SS | |
| 851 | NBX21051 | QVQLQESGGGLVQAGGSLRLSCAAS | NetB |
| | | GRTFSSYAMGWFRQAPGKEREFVAA | |
| | | ISRSGASTYYADSVKGRFTISRDNA | |
| | | KNTVYLQMDNLKPEDTAVYYCAADS | |
| | | LRTHVSHVSYEYDSWGQGTQVTVSS | |
| 852 | NBX21052 | QVQLQESGGGLVQAGGSLRLSCAAS | NetB |
| | | GRTFSSYAMGWFRQGPGKEREFVAA | |
| | | IARSGSSTYYADSVKGRFTISRDKA | |
| | | KNTVYLQMNSLKPEDTAVYYCAADS | |
| | | LRTHVSDRSDEYDYWGQGTQVTVSS | |
| 853 | NBX21053 | QVQLQESGGGLVQAGGSLRLSCAAS | NetB |
| | | GRTFSRYGMGWFRQAPGKDREFVAA | |
| | | ISWSGDSTYYVDSVKGRFTISRDNA | |
| | | KNTVYLQMNSLKPDDTAVYYCGASY | |
| | | NPGNIATIRREYEYDYWGQGTQVTV | |
| | | SS | |
| 854 | NBX21054 | QVQLQQSGGGLVQAGDSLRLSCAAS | NetB |
| | | GRTFSHYAMGWFRQAPGKEREFVAA | |
| | | IRTSAGITRYGDSAEGRFTISSDNA | |
| | | KNTVYLQMNSLKPEDTAVYYCAIDD | |
| | | DYAYYPPSLLDRYDYWGQGTQVTVS | |
| | | S | |
| 855 | NBX21055 | QVQLQESGGGLVQAGGSLRLSCAAS | NetB |
| | | GRTASSAAMGWFRQAPGKEREFVAA | |
| | | ISWSGGSTYYADSVKGRFTISRDNA | |
| | | KNTVYLQMNSLKPEDTAVYYCAADR | |
| | | RTHVSDRLGEYDYWGQGTQVTVSS | |
| 856 | NBX21056 | QVQLQESGGGLVQAGGSLRLSCAAS | NetB |
| | | GRTFSTYAMGWFRQAPGKEREFVAA | |
| | | ISRSGASTYYGDSVKGRFTISRDNA | |
| | | KNTVYLQMDSLKPEDTAVYYCAADS | |
| | | LRTHVSHVSYEYDSWGQGTQVTVSS | |
| 857 | NBX21057 | QVQLQESGGGLVQAGGSLRLSCAAS | NetB |
| | | GRTLSRYGMGWFRQAPGKEREFVAA | |
| | | ISWSGDRTYYADSVNGRFTISRDNA | |
| | | KNTVYLQMNSLKPEDMGVYYCAASY | |
| | | NPGNIATIRREYEYDYWGQGTQVTV | |
| | | SS | |
| 858 | NBX21068 | QVQLQESGGGLRQAGGSLRLSCAAS | NetB |
| | | GGTFSRYGLGWFRQAPGKEREFVAA | |
| | | ISWSGDRTYYADSVKGRFTISRDNA | |
| | | KNTVYLQMNSLKPEDTAVYYCGASY | |
| | | NPGNIATIRREYEYDYWGQGTQVTV | |
| | | SS | |
| 859 | NBX21069 | QVQLQQSGGGLVQAGGSLRLSCAAS | NetB |
| | | EGTFSRYGMGWFRQAPGKEREFVAA | |
| | | ISWSGDSTYYADSVKGRFTISRDNA | |
| | | KNTVYLQMNSLKPEDTAVYYCAASY | |
| | | NPGNIATIRREYEYDYWGQGTQVTV | |
| | | SS | |
| 860 | NBX21070 | QVQLQESGGGLVQAGGSLRLSCAAS | NetB |
| | | GRTFSMYTMGWFRQAPGKKREFVAT | |
| | | ISGSAGSTYYADSVKGRFTISRDTA | |
| | | KTTVYLQMNILKPEDTAVYYCASST | |
| | | ATHGTNRQLDYDYWGQGTQVTVSS | |
| 861 | NBX21071 | QVQLQESGGGLVQAGGSLRLSCAPS | NetB |
| | | GRTFSTGAMGWFRQAPGKEREFVAA | |
| | | ISWSGGSTYYADSVKGRFTISRDNA | |
| | | KNTVYLQMNSLKPEDTAVYYCAASL | |
| | | LTHVSDRALEYDYWGQGTQVTVSS | |
| 862 | NBX21072 | QVQLQQSGGGLVQAGGSLRLSCAAS | NetB |
| | | EGTFSRYGMGWFRQAPGKEREFVAA | |
| | | ISWSGDRTYYTDSVKGRFTISRDNA | |
| | | KNTVYLQMNSLKPEDTAVYYCAASY | |
| | | NPGNIATIRREYEYDYWGQGTQVTV | |
| | | SS | |
| 863 | NBX21073 | QVQLQESGGGLVQPGGSLRLSCAAS | NetB |
| | | GSIFSINVMGWYRQAPGKQRELVAA | |
| | | ATSGGQTKYAHSVKGRFTISRDNAK | |
| | | NTVYLQMNSLKPEDTAVYYCNGRSA | |
| | | SYYPTYDYWGQGTQVTVSS | |
| 864 | NBX21074 | QVQLQLQESGGGLVQAGDSLRLSCA | NetB |
| | | ASGRTFSHYAMGWFRQAPGKEREFV | |
| | | AAIRGNAGITRYADSAEGRFTISTD | |
| | | NAKNTVYLQMNSLEPEDTAVYYCAI | |
| | | DLDYAYYPPSLVDRYDYWGQGTQVT | |
| | | VSS | |
| 865 | NBX21075 | QVQLQESGGGLVQPGGSLRLSCAAS | NetB |
| | | GSSGSMKDMGWYRQPPGKQRELVAR | |
| | | ITTGGTTTYADSVKGRFTISRDNAK | |
| | | NTVYLQMNNLKPEDTDVYYCNVLLN | |
| | | YRGPSSASYHWGQGTQVTVSS | |
| 866 | NBX21076 | QVQLQESGGGLVQAGGSLRLSCAAS | NetB |
| | | GRTFSHYAMGWFRQAPGKEREFAAA | |
| | | ISRSGGSTYYADSVKGRFTISRDNA | |
| | | KNTVYLQMNSLKPEDTAVYYCAADS | |
| | | LRTHVSDRSYEYDSWGQGTQVTVSS | |
| 867 | NBX21077 | QVQLQESGGGLVQAGGSLRLSCAAS | NetB |
| | | GRTFSTYAMGWFRQAPGKEREFVAA | |
| | | ISRSGGSTYYADSVKGRFTISRDKA | |
| | | KNTVYLQMNSLKPEDTAVYYCAADS | |
| | | LRTHVSDRSYEYDYWGQGTQVTVSS | |
| 868 | NBX21078 | QVQLQESGGGLVQPGGSLRLSCAAS | NetB |
| | | GSIFSSDDMGWYRQAPGKQRELVAL | |
| | | ITSGGMTKYEDFVKGRFTISRDNSK | |
| | | DTVSLQMNSLKPEDTAVYYCNAFRS | |
| | | KVVDGIILKRRDYDYWGQGTQVTVS | |
| | | S | |
| 869 | NBX21079 | QVQLQQSGGGLVQAGGSLRLSCAAS | NetB |
| | | GRTFSSYTMGWFRQAPGKEREFVAT | |
| | | ISGSAGSTYYADSVKGRFTISRDTA | |
| | | KTTVYLQMNILKPEDTAVYYCAASE | |
| | | ATHGTNRQLDYDYWGQGTQVTVSS | |
| 870 | NBX21080 | QVQLQESGGGLVQAGGSLRLSCAAS | NetB |
| | | GSIFSDDIWGWYRQAPGKQRELVAH | |
| | | ITRGSRPYYYVDSVKGRFTISRDNA | |
| | | KTMVYLQMNSLKPEDTAVYYCNAVP | |
| | | ARDRWGQGTQVTVSS | |
| 871 | NBX21081 | QVQLQQSGGGLVQPGGSLRLSCAAS | NetB |
| | | GSIGSINVMGWYRQAPGNERELVAH | |
| | | VTSGGMTRYTESVKGRFTISRDGAK | |
| | | NTVYLQMNSLKPEDTAVYYCNGRSA | |
| | | SYYPTYNYWGQGTQVTVSS | |
| 872 | NBX21082 | QVQLQQSGGGLVQAGGSLRLSCAAS | NetB |
| | | GDTLSRYGMAWFRQAPGKEREFVAA | |
| | | ITWSGSSTYYADSVKGRFTISRDNA | |
| | | KNTVDLQMNSLKPKDTAVYYCAAGP | |
| | | NLGPITIMRDYEYDYWGQGTQVTVS | |
| | | S | |
| 873 | NBX21083 | QVQLQQSGGGLVQPGGSLRLSCAAS | NetB |
| | | GSIFSINVMGWYRQAPGKQRELVAS | |
| | | ITSGGKSRYADSVKGRFTISRDNGQ | |
| | | NTVYLQMNSLKPEDTANYYCNGRSA | |
| | | SYYPTYDYWGQGTQVTVSS | |
| 874 | NBX21084 | QVQLQQSGGGLVQPGGSLRLSCAAS | NetB |
| | | GSIGSINVMGWYRQAPGNERELVAH | |
| | | ATSGGMTRYTDSVKGRFTISRDGAK | |
| | | NTVYLQMNNLKPEDTAVYYCNGRSA | |
| | | SYYPTYNYWGQGTQVTVSS | |
| 875 | NBX21085 | QVQLQQSGGGLVQAGGSLRLSCAAS | NetB |
| | | GGTFSRYGMGWFRQAPGKEREFVAA | |
| | | ISWSGDRTYYADSVKGRFTISRDNA | |
| | | KDTVYLQMNSLKPEDTAVYYCAASY | |
| | | NPGNIATIRREYEYDYWGQGTQVTV | |
| | | SS | |
| 876 | NBX21086 | QVQLQESGGGLVQAGGSLRLSCVVS | NetB |
| | | GSTFSINRVAWFRQAPGKERQFVAG | |
| | | IRSNGITNYADSVKGRFTISSDNEK | |
| | | NTVYLQMNSLKPEDTAIYYCNDPLA | |
| | | PFSSDASWGQGTQVTVSS | |
| 877 | NBX22019 | QVQLQQSGGGLVQAGGSLRLSCAAS | CnaA |
| | | GRTFSSYAMGWFRQAPGKEREFVAS | |
| | | ISWSGGITWYADSVKGRFTISRDNA | |
| | | KNTVYLQMNSLKPEDTAVYYCAADA | |
| | | RSDSGSYYYPADFGSWGQGTQVTVS | |
| | | S | |
| 878 | NBX22020 | QVQLQESGGGLVQAGGSLRLSCAAS | CnaA |
| | | GGTFSSYPMAWFRQAPGKEREFVAA | |
| | | ISWSGGTTYYADSVKGRFTISRDNA | |
| | | KNTVYLQMNSLKPEDTAVYYCAAQS | |
| | | GPYGSSSSWEADFGSWGQGTQVTVS | |
| | | S | |
| 879 | NBX22021 | QVQLQESGGGLVQAGGSLRLSCTAS | CnaA |
| | | GRTLSSYIMAWFRQAPGKEREFVAA | |
| | | IAWSGSVTQYADSVKGRFTISRDNA | |
| | | KNTAYLQMNSLKPEDTAVYYCAGDL | |
| | | HGIGYEYKYWGQGTQVTVSS | |
| 880 | NBX22022 | QVQLQESGGGLVQSGGSLRLSCAAS | CnaA |
| | | GFSLDDYAIGWFRQAPGKEREGVSC | |
| | | ISRTSDGSTYFADSVKGRFTISSDN | |
| | | AKNTVYLQMNSLKPEDTAVYYCAAG | |
| | | FVCSGYGGGIRGYEYDYWGQGTQVT | |
| | | VSS | |
| 881 | NBX22023 | QVQLQESGGGLVQPGGSLRLSCAFS | CnaA |
| | | GNIFSINLMTWYRQAPGKQREFVAS | |
| | | ITSGGNTNYVNFAKGRFTISTDNAK | |
| | | NTMYLQLNSLOPEDTAVYYCHCDWC | |
| | | SWGQGTQVTVSS | |
| 882 | NBX22024 | QVQLQESGGGLVQAGGSLRLSCAAS | CnaA |
| | | GGTFSSYPMGWFRQAPGKEREFVAA | |
| | | ISWSGGGTYYADSVKGRFTISRDNA | |
| | | KNTVYLQMNSLKPEDTAVYYCAADS | |
| | | PVGPSGLTTHWGYWGQGTQVTVSS | |
| 883 | NBX22025 | QVQLQESGGGLVQAGGSLRVSCAAS | CnaA |
| | | GRTFSSYVMGWFRQAPGKEREFVAA | |
| | | ISWSGGVTYYADSVKGRFTISRDNA | |
| | | KNTVYLQMNSLKPDDTAVYYCAADA | |
| | | RSDSGRYYYPADFGSWGQGTQVTVS | |
| | | S | |
| 884 | NBX22029 | QVQLQQSGGGLVQAGGSLRLSCAAS | CnaA |
| | | GRTFSNYVMGWFRQPPGKEREFVAA | |
| | | ISWSGGTTSYADSVKGRFTISRDNA | |
| | | KNTVYLQMNSLKPDDTAVYYCAAEH | |
| | | GAGSRWYFPEDFGSWGQGTQVTVSS | |
| 885 | NBX22030 | QVQLQESGGGLVQPGGSLRLSCAFS | CnaA |
| | | GNIFSINLMTWYRQAPGKQREFVAS | |
| | | ITSSGNTNYVNSGKGRFTISTDNAK | |
| | | NTMYLQLNSLOPEDTAVYYCHCDWC | |
| | | SWGQGTQVTVSS | |
| 886 | NBX22031 | QVQLQESGGGLVQAGGSLRLSCAAS | CnaA |
| | | GGTFSSYPMGWFRQAPGKEREFVAA | |
| | | ISWSGGVTYYADSVKGRFTISRDNA | |
| | | KNTVYLQMNSLKPEDTAVYYCAAQS | |
| | | GPYGSSSSWEADFDSWGQGTQVTVS | |
| | | S | |
| 887 | NBX22032 | QVQLQESGGGLVQAGGSLRLSCVAS | CnaA |
| | | GRTFSSYVMAWFRQAPGKEREFVAA | |
| | | ISWSGGVTNYADSVKGRFIISRDNA | |
| | | KNTVYLQMNSLKPEDTAVYYCAAEV | |
| | | GYGSRWYYETDFGSWGQGTQVTVSS | |
| 888 | NBX22033 | QVQLQQSGGGLVQAGGSLRLSCAAS | CnaA |
| | | GRTLSSYAMGWFRQAPGKEREFVAA | |
| | | ISWSGGVTHYEDSVKGRFTISRDNA | |
| | | KNTVYLQMNSLKPEDTAVYYCAALP | |
| | | DGRSWYQADYWGQGTQVTVSS | |
| 889 | NBX22034 | QVQLQQSGGGLVQAGGSLRLSCAAS | CnaA |
| | | GRTFSSYAMGWFRQAPGKEREFVAA | |
| | | ISWSGGVTHYADSVKGRFTISRDNA | |
| | | KNTVYLQMNSLKPEDTAVYYCAAEN | |
| | | GYGSSWYFEADFGSWGQGTQVTVSS | |
| 890 | NBX22035 | QVQLQQSGGGLVQAGGSLRLSCAAS | CnaA |
| | | GRTFSGSGMGWFRQAPGKEREFVAA | |
| | | ISWTGSITYYADSVKGRFTISRENA | |
| | | KNTVYLQMNSLKPEDTAVYYCARAT | |
| | | MGPTSRSDAYDYWGQGTQVTVSS | |
| 891 | NBX22036 | QVQLQESGGGLVQPGGSLRLSCAFS | CnaA |
| | | GNIFSINVMSWYRQAPGKQREFVAD | |
| | | ITSGGNTNYVNFGKGRFTISTDNAK | |
| | | NTMYLQLNSLOPEDTAVYYCHCDWC | |
| | | SWGQGTQVTVSS | |
| 892 | NBX22037 | QVQLQQSGGGLVQPGGSLRLSCAFS | CnaA |
| | | GNIFSINVMSWYRQAPGKQREFVAD | |
| | | ITSGGDTNYVNSGKGRFTISTDNAK | |
| | | NTMYLOLNSLQPEDTAVYYCHCDWC | |
| | | SWGQGTQVTVSS | |
| 893 | NBX22038 | QVQLQESGGGLVQPGGSLRLSCAFS | CnaA |
| | | GNIFSINLMTWYRQAPGKQREFVAS | |
| | | ITSGGHTNYVNSGKGRFTISTDNAK | |
| | | NTMYLQLNSLOPEDTAVYYCHCDWC | |
| | | SWGQGTQVTVSS | |
| 894 | NBX22039 | QVQLQESGGGLVQPGDSLRLSCAAS | CnaA |
| | | GGTFSNYAMGWFRQAPGKEREFVAA | |
| | | ISWSGGVAHYADSVKGRFTISRDNA | |
| | | KNTVYLQMNSLKPEDTAVYTCAAEV | |
| | | GYGTSWYYEADFGSWGQGTQVTVSS | |
| 895 | NBX22040 | QVQLQESGGGLVQAGGSLRLSCAAS | CnaA |
| | | GRTFSGSGMGWFRQAPGKEREFVAV | |
| | | ISWTGSITYYADSVKGRFTISRENA | |
| | | KNTVYLQMNSLKPEDTAVYYCARST | |
| | | VGPTSRSDAYDYWGQGTQVTVSS | |
| 896 | NBX22041 | QVQLQESGGGLVQAGGSLRLSCTAS | CnaA |
| | | GRTLSDYIMGWFRQAPGKEREFVAA | |
| | | IAWSGSTTQYTDSVKGRFTISRDNA | |
| | | KNTAYLQMNSLKPEDTAVYYCAGDL | |
| | | HGIGYEYKYWGQGTQVTVSS | |
| 897 | NBX22042 | QVQLQESGGGLVQAGGSLRLSCAAS | CnaA |
| | | GRTFSGSPMGWFRQAPGKEREFVAV | |
| | | ISWTGSITYYADSVKGRFTISRENA | |
| | | KNTVYLQMNSLKPEDTAVYYCARST | |
| | | VGPTSRSDAYDYWGQGTQVTVSS | |
| 898 | NBX22043 | QVQLQESGGAVVQPGGSLRLSCAFS | CnaA |
| | | GNVLSINLMTWYRQAPGKQREFVAS | |
| | | ITSGGDTNYVNFGKGRFTIATDNAK | |
| | | NMMYLQLNSLOPEDTAVYYCHCDWC | |
| | | SWGQGTLVTVSS | |
| 899 | NBX22044 | QVQLQESGGGLVQAGGSLRLSCVAS | CnaA |
| | | GRAFSRYTMGWFRQAPGKEREFAAT | |
| | | IDWSGGIDWSGGRSTFYADSVKGRF | |
| | | TISRDNAENTVYLQMNSLKPEDTAV | |
| | | YYCAAIDYPGTRPAVSANEYDYWGQ | |
| | | GTQVTVSS | |
| 900 | NBX22045 | QVQLQESGGGLVQAGGSLRLSCTAS | CnaA |
| | | GRTLSNYIMAWFRQAPGREREFVAA | |
| | | IAWSGSVTQYADSVKGRFTISRDNA | |
| | | KNTAYLQMNSLKPEDTAVYYCAGDL | |
| | | HGIGYEYAYWGQGTQVTVSS | |
| 901 | NBX22046 | QVQLQESGGGLVQAGGSLRLSCTAS | CnaA |
| | | GRTLSSYIMAWFRQAPGKEREFVAA | |
| | | IGWSGSTTQYADSVKGRFTISRDNA | |
| | | KNTAYLQMNALKPEDTAVYYCAGDL | |
| | | QGIGYEYHNWGQGTQVTVSS | |
| 902 | NBX22055 | QVQLQESGGGLVQAGGSLRLSCAAS | CnaA |
| | | GGTFSNYVMGWFRQAPGKEREFVAA | |
| | | ISWSGGSTYYADSVKGRFTISRDNA | |
| | | KNTVYLQMNSLKPEDTAVYYCAAET | |
| | | GGGSRWYRTADFGSWGQGTQVTVSS | |
| 903 | NBX22056 | QVQLQQSGGGLVQAGGSLTLSCAAS | CnaA |
| | | GRTFSTYGMGWFRQAPGKEREFVAA | |
| | | ISASGGGTAYANSVKARFTISRDNA | |
| | | KNTVYLQMNSLKPEDTAVYYCAADR | |
| | | TTWGRQTPYDYWGQGTQVTVSS | |
| 904 | NBX22057 | QVQLQESGGGLVQAGGSLRLSCAAS | CnaA |
| | | GRTFSTYAMGWFRQAPGKEREFVTR | |
| | | IRWNTGSTDYADSVKGRFTISRDKA | |
| | | KNMVWLQMDSLKPEDTAVYYCALKR | |
| | | YGGGTSTYDQGYDTWGQGTQVTVSS | |
| 905 | NBX22058 | QVQLQQSGGGLVQAGGSLRLSCAAS | CnaA |
| | | GRTFSSGAMGWFRQAPGKEREFAAA | |
| | | ISRSGSSTLYADSVKGRFTITRDSA | |
| | | KSTVFLQMNSLKPEDTAVYYCAASL | |
| | | GRAYETSASGAYDYWGQGTQVTVSS | |
| 906 | NBX22059 | QVQLQESGGGLVQTGDSLRLSCAAS | CnaA |
| | | GRTFRSYGVAWFRQAPGKERDFVAS | |
| | | ISSSGGGTSYAGSVKDRFAIFRDNA | |
| | | KNTVYLQMNSLKPEDTAVYYCAGAV | |
| | | RDWGRDAIYDSWGQGTQVTVSS | |
| 907 | NBX22060 | QVQLQESGGGLVQPGGSLRLSCAAS | CnaA |
| | | GFTFSRYAMSWYRQAPGKERELVAR | |
| | | ITSAGGSTNYADSVKGRFTISRDNA | |
| | | KNTVYLQMNSLKPEDTAVYYCNAEM | |
| | | YSNADVMFNGYWGQGTQVTVSS | |
| 908 | NBX22061 | QVQLQESGGGLVQAGGSLRLSCAAS | CnaA |
| | | GRTISNYTMGWFRQAPGKEREFVAG | |
| | | INPSGGATYYAPFVKDRFTISRDSA | |
| | | KNTVYLQMNSLKPEDTAVYSCAAGS | |
| | | SHGRRWYIDGGRYDYWGQGTQVTIS | |
| | | S | |
| 909 | NBX22062 | QVQLQESGGGLVQPGGSLRLSCAAS | CnaA |
| | | GFTFSNYAMSWYRQAPGKERELVAR | |
| | | ITSTGGSTNYADSVKGRFTISRDNA | |
| | | KNTVYLQMNSLKPEDTAVYYCNAEI | |
| | | YTHYDVMFNGYWGQGTQVTVSS | |
| 910 | NBX22063 | QVQLQESGGGSVQAGGSLRLSCAAS | CnaA |
| | | GRTFSTYGMGWFRQAPGKEREFVAG | |
| | | ISASGGGTAYVSSVKARFTISRDNA | |
| | | KNTVYLQMNSLKPEDTAIYYCAAAR | |
| | | TGWGRQTTHDYWGQGTQVTVSS | |
| 911 | NBX22064 | QVQLQQSGGGLVQPGGSLRLSCKAS | CnaA |
| | | GFTFSSYSMRWYRQIPENEREFVAF | |
| | | ISSGGGDITSVADSVKGRFTITRDD | |
| | | TRNTVYLQMNSLKPEDTAVYYCMRV | |
| | | SGDYWGQGTQVTVSS | |
| 912 | NBX22065 | QVQLQESGGGLVQAGGSLRLSCTAS | CnaA |
| | | GRTFSSGAMGWFRQAPGKEREFVAA | |
| | | ISRSGSGTLYADSVKGRFTITRVSA | |
| | | KSTVFLQMNSLNPEDTAVYYCAASL | |
| | | GRAYETSASGAYDYWGQGTQVTVSS | |
| 913 | NBX22066 | QVQLQQSGGGLVQAGGSLRLSCTAS | CnaA |
| | | GRTFRSYGVGWFRQAPGKERDFVAG | |
| | | ISWSGGGTAYAGSVKDRFAIFRDNA | |
| | | KSTVYLQMNSLKPEDTAVYYCAGAV | |
| | | GDWGRDAIYDYWGQGTQVTVSS | |
| 914 | NBX22067 | QVQLQQSGGGLVQAGGSLRLSCAAS | CnaA |
| | | GRTFSSYGMGWFRQVPGKEREFVTG | |
| | | ISTSGGGTSYANFVNDRFTISRDNA | |
| | | KNTVYLQMNSLKPGDTAVYYCAASS | |
| | | RGWGRGVSYDYWGQGTQVTVSS | |
| 915 | NBX22068 | QVQLQQSGGGLVQAGGSLRLSCAAS | CnaA |
| | | GGTFSNYVMGWFRQAPGKEREYVAA | |
| | | ISWSGGNAIYADSVKGRFTISRDNA | |
| | | KNTVYLQMDRLKPEDTALYYCAAET | |
| | | GYGNRWYAPADFGSWGQGTQVTVSS | |
| 916 | NBX22069 | QVQLQESGGGSVQAGGSLRLSCAAS | CnaA |
| | | GHTFSTYGMGWFRQAPGKEREFVAG | |
| | | ISASGGGTAYVSSVKARFTISRDNA | |
| | | KNTVYLQMNSLKPEDTAIYYCAAAR | |
| | | TGWGROTTHDYWGQGTQVTVSS | |
| 917 | NBX22070 | QVQLQQSGGGLVQAGGSLRLSCAAS | CnaA |
| | | GRTFSSYGMGWFRQAPGKEREFVTG | |
| | | ISRSGGGTSFAPFVKGRFTISRDNA | |
| | | KNTVYLQMNSLKPGDTAIYYCAASS | |
| | | TGWGREDSYDYWGQGTQVTVDS | |
| 918 | NBX22083 | QVQLQESGGGLVQAGGSLRLSCAAS | CnaA |
| | | GRTFSSYVMGWFRQAPGKEREFVAA | |
| | | ISWSGGVTYYADSVKGRFTISRDNA | |
| | | KNTMYLQMNSLKPEDTAVYYCAASD | |
| | | SENSGSYYRNQDFGYWGQGTQVTVS | |
| | | S | |
| 919 | NBX22084 | QVQLQQSGGGLVQAGGSLRLSCAAS | CnaA |
| | | GRTFSNYAMGWFRQAPGKEREFVAA | |
| | | ISWSGGITWYADSVKGRFTISRDNA | |
| | | KNTVYLQMNSLKPEDTAVYYCAADR | |
| | | GTDSGSYYYTEDFGSWGQGTQVTVS | |
| | | S | |
| 920 | NBX22085 | QVQLQESGGGLVQAGGSLRLSCAAS | CnaA |
| | | GGTFSSYVMGWFRRAPGKERDFVAA | |
| | | ISWSGGVTQYADSVKGRFTISRDNA | |
| | | KNTVYLQMNSLKPEDTAVYYCAADR | |
| | | TAVVPAQIRSYNYWGQGTQVTVSS | |
| 921 | NBX22086 | QVQLQESGGGLVQAGGSLRLSCAAS | CnaA |
| | | GRTFSNYIMGWFRQAPGKEREFVAA | |
| | | ISWSGGVTHYADSVKGRFTISRDNA | |
| | | NNTVFLQMNSLKPEDTAVYYCAAEV | |
| | | GYGSSWYYEADFGSWGQGTQVTVSS | |
| 922 | NBX22087 | QVQLQESGGGLVQAGGSLRLSCAAS | CnaA |
| | | GRTFSSYAMGWFRQAPGKEREFVAA | |
| | | ISWSGGITYYADSVKGRFTISRDNA | |
| | | KNTVYLQMNSLKPEDTAVYYCAADL | |
| | | EGAGNFREFGSWGQGTQVTVSS | |
| 923 | NBX22088 | QVQLQESGGGLVQAGGSLRLSCAAS | CnaA |
| | | GRTFSSYVMGWFRRAPGKEREFVAA | |
| | | ISWSGGVTQYADSVKGRFTASRDNA | |
| | | KNTVYLQMSSLKPEDTAVYYCAADR | |
| | | TAIVPAQIRSYDYWGQGTQVTVSS | |
| 924 | NBX22089 | QVQLQESGGGLEQPGGSLRLSCLVS | CnaA |
| | | GRTGGSFDMGWFRRTPGKEREFIAA | |
| | | ITWSGGSTEYADSVKGRFTISRDNG | |
| | | KNTVQLQMNSLKPEDTAVYYCAAGG | |
| | | FGALGVEHRYRYWGQGTQVTVSS | |
| 925 | NBX22090 | QVQLQESGGGLVQPGGSLRLSCAFS | CnaA |
| | | GNIFSISLMTWYRQAPGKQREFVAS | |
| | | ITSGGNTDYVNSGKGRFTISTDNAK | |
| | | NTMYLQLNSLOPEDTAVYYCHCDWC | |
| | | SWGQGTQVTVSS | |
| 926 | NBX22093 | QVQLQESGGGLVQAGGSLRLACVAS | CnaA |
| | | GRTFKIYGVAWFRQAPGKERDFVAG | |
| | | ISSSGGGTAYAGSVKDRFAISRDNA | |
| | | KNTVYLQMNSLKPEDTAVYYCAVGG | |
| | | WGRDDIYDYWGQGTQVTVSS | |
| 927 | NBX22094 | QVQLQQSGGGLVQAGGSLRLSCAAS | CnaA |
| | | ARTFSEYIMAWFRQAPGKEREFVAA | |
| | | ISSSGATTAYSNSVKDRFTISRDNA | |
| | | KNTLFLQLNNLKLEDTAAYYCAANR | |
| | | FLSAARYDRQRYDYWGQGTQVTVSS | |
| 928 | NBX22095 | QVQLQESGGGSVQAGGSLTLSCAVS | CnaA |
| | | GHTFSTYGMGWFRQAPGKEREYVAG | |
| | | ISASGGGTAYVSSVKARFTISRDNA | |
| | | KNTVYLQMNSLKPEDTAIYYCAAAR | |
| | | ASWGRQTTHDYWGQGTQVTVSS | |
| 929 | NBX22096 | QVQLQESGGGLVQPGGSLRLSCAAS | CnaA |
| | | GLTLNNYALRWYRQSAGSERELVAF | |
| | | ISAGGDIISYAESVKGRFTITRDNT | |
| | | KNTVYLQMNSLKPEDTAVYRCNRVS | |
| | | GDYWGQGTQVTVSS | |
| 930 | NBX22097 | QVQLQESGGGLVQAGGSLRLSCAAS | CnaA |
| | | GRTFSTYGMGWFRQAPGKEQEFVSS | |
| | | ISASGGGTAYANSVKARFTISRDNA | |
| | | KNTVYLQMNNLKPEDTAVYYCAAAR | |
| | | TGWGROTTYDYWGQGTQVTVSS | |
| 931 | NBX22098 | QVQLQESGGGLVQAGGSLRLSCAAS | CnaA |
| | | GGSLSNYIVGWFRQAPGKEREFVAI | |
| | | ISWSGEVTDYADSVKGRFTISRDNA | |
| | | GNTVNLQMNNLNPEDTAVYYCAGEH | |
| | | NGRSWYDVGNYAYWGQGTQVTVSS | |
| 932 | NBX22099 | QVQLQESGGGLVQAGGSLTLSCGPS | CnaA |
| | | GRTFSSGAMGWFRQAPGKEREFVAA | |
| | | ISRSGSRTLYADSVKGRFTITRDSA | |
| | | KPTVFLQMNSLKPEDTAVYYCAASL | |
| | | GRGYENSDSGAYDYWGQGTQVTVAS | |
| 933 | NBX22100 | QVQLQQSGGGLVQPGGSLRLSCAAS | CnaA |
| | | GFNLNYYAIGWFRQAPGKEREGVSC | |
| | | ISSSDGSTVYADSVKGRFTISRDNA | |
| | | KVYLQMNSLKPEDTAVYYCAARAGG | |
| | | EFYYCSGDSSADYWGQGTQVTVSS | |
| 934 | NBX22101 | QVQLQESGGGLVQAGGSLRLSCVPG | CnaA |
| | | RTFSSGAMGWFRQAPGKEREFVASI | |
| | | SRSSSRTLYADSVKGRFTITRDSAK | |
| | | NTMFLQMNSLKPEDTAVYYCAASLS | |
| | | RGYETSDSGAYDYWGQGTQVTVSS | |
| 935 | NBX22102 | QVQLQESGGGLVQAGGSLRLSCVAS | CnaA |
| | | GRTFRMYGVGWFRQGPGKERAFVAG | |
| | | ISSSGAGTAFAGSVEGRFAISRDNA | |
| | | KNTVYLQMNNLKPEDTAVYYCAGAD | |
| | | RDWGRDAIYDYWGQGTQVTVSS | |
| 936 | NBX22103 | QVQLQQSGGGLVQPGGSLRLSCAAS | CnaA |
| | | GFTWNNYGMRWYRQTPGKEREYVAF | |
| | | INSGGDIISYADSVKGRFTITRDNL | |
| | | RNVVYLQMNSLKPEDTAVYYCNRIS | |
| | | GDYWGQGTQVTVSS | |
| 937 | NBX22104 | QVQLQESGGGLVQAGGSLRLSCVPG | CnaA |
| | | RTFSFGAMAWFRQAPGKEREFVASI | |
| | | SRSVSRTLYADSVKGRFTITRDSAK | |
| | | NTMFLQMNSLKPEDTAVYYCAASQG | |
| | | RGYETSATGAYDYWGQGTQVTVSS | |
| 938 | NBX22105 | QVQLQQSGGGLVQAGGSLRLSCAAS | CnaA |
| | | GRTFSDYIMGWFRQAPGKEREFVAA | |
| | | ISWSGGVTHYADSVKGRFTISRDNA | |
| | | KNTVYLQMNSLKPEDTAVYYCAADG | |
| | | RSDSGGSYYPADFGSWGQGTQVTVS | |
| | | S | |
| 939 | NBX22106 | QVQLQESGGDLVQAGGSLRLSCAAS | CnaA |
| | | GFTFDDYAIGWFRQAPGKEREGVSC | |
| | | IERSGSSTWYADSVKGRFTISSDNA | |
| | | KNTVYLQMNSLKPEDMAVYYCAAGR | |
| | | VCSGYGGRIQGYEYDYWGQGTQVTV | |
| | | SS | |
| 940 | NBX22107 | QVQLQQSGGGLVQAGGSLRLSCVPG | CnaA |
| | | RTFSFGAMGWFRQAPGKEREFVASI | |
| | | SRSVSRTLYADSVKGRFTITRDSAK | |
| | | NTMFLQMNSLKPEDTAVYYCAASQG | |
| | | RGYETSDTGAYDYWGQGTQVTVTS | |
| 941 | NBX22108 | QVQLQESGGGLVQAGGSLRLSCAAS | CnaA |
| | | GRTFTMYGVGWFRQAPGKEREFVAG | |
| | | ISSSGGGTSYAGSVKGRFAISKDNA | |
| | | KNTVYLQMNSLKPEDTAVYYCAVGG | |
| | | WGRDDIYEYWGQGTQVTVSS | |
| 942 | NBX22109 | QVQLQESGGGLVQAGGSLTLSCGPS | CnaA |
| | | GRTFSSGAMGWFRQAPGKEREFVAA | |
| | | ISRSGSTTLYADSVKGRFTITRDSA | |
| | | KPTVFLQMNSLKPEDTAVYYCAASL | |
| | | GRGYENSDSGAYDYWGQGTQVTVAS | |
| 943 | NBX22110 | QVQLQESGGGLVQAGGSLRLSCVPG | CnaA |
| | | RTFSSGAMGWFRQAPGKEREFVASI | |
| | | SRSSSRTLYADSVKGRFTITRDSAK | |
| | | NTMFLQMNSLKPEDTAVYYCAASLS | |
| | | RAYETSDSGAYDYWGQGTQVTVSS | |
| 944 | NBX22111 | QVQLQQSGGGSVQAGGSLRLSCVAS | CnaA |
| | | GRTFSTYGMGWFRQAPGKEREYVAG | |
| | | ISASGGGTAYVSSVKARFTISRDNA | |
| | | KNTVYLQMNSLKPEDTAIYYCAAAR | |
| | | TSWGRQTTHDYWGQGTQVTVSS | |
| 945 | NBX22112 | QVQLQESGGGVVQAGGSLRLSCAAS | CnaA |
| | | GRTFSDYVMGWFRQAPGKEREFVAA | |
| | | ISWSGGVTHYADSVKGRFTISRDNA | |
| | | QNTAYLQMDSLKPEDTAVYYCAADA | |
| | | RSDSGRWYYPADFGSWGQGTQVTVS | |
| | | S | |
| 946 | NBX22119 | QVQLQESGGGLVQAGGSLRLSCAAS | CnaA |
| | | GRTFSSYAMGWFRQAPGKEREFVAA | |
| | | ISWSGGITWYADSVKGRFTISRDNA | |
| | | KNTVYLQMNSLKPEDTAVYYCAADT | |
| | | GADSGSYYYPADFGSWGQGTQVTVS | |
| | | S | |
| 947 | NBX22120 | QVQLQESGGGLVQAGGSLRLSCAAS | CnaA |
| | | GGTFSSYIMGWFRQGPGKEREFVAA | |
| | | ISWSGGVTYYADSVKGRFTISRDNA | |
| | | KNTVYLQMNSLKPEDTAVYYCAADA | |
| | | RSDSGRYYYPADFGSWGQGTQVTVS | |
| | | S | |
| 948 | NBX22121 | QVQLQQSGGGLVQAGGSLRLSCAAS | CnaA |
| | | GRTLSNYAMAWFRQAPGKERALVAS | |
| | | ISGSGSNTNYPNSVKDRFTISRDNA | |
| | | KNTVYLQMNSLKPEDTAVYYCAARE | |
| | | GLALRYATYDYWGQGTQVTVSS | |
| 949 | NBX22122 | QVQLQESGGGLVQPGGSLRLSCAFS | CnaA |
| | | GNIFSIALMTWYRQAPGKQREFVAS | |
| | | ITSGGNTNYVNSGKGRFTISTDNAK | |
| | | NTMYLQLNSLOPEDTAVYYCHCDWC | |
| | | SWGQGTQVTVSS | |
| 950 | NBX22123 | QVQLQQSGGGSVQPGGSLRLSCAAS | CnaA |
| | | GRTFSTYGMGWFRQAPGKEREFVAG | |
| | | ISASGGGTAYIGSVKARFTISRDNA | |
| | | KNTVYLQMNSLKPEDTAIYYCAVAR | |
| | | TGWGREATHDYWGQGTQVTVSS | |
| 951 | NBX22124 | QVQLQQSGGRLVQAGGSLRLSCAAS | CnaA |
| | | GRTFSDYEMAWFRQGPGKEREFVAG | |
| | | ISGSGGTTAFANFVKGRFIISRDNA | |
| | | KNTMYLQMNNLKLEDTGVYYCAARV | |
| | | PRVGRFDENEYEYWGQGTQVTVSS | |
| 952 | NBX22125 | QVQLQQSGGGLVQAGGSLRLSCAAS | CnaA |
| | | GDTFSAYGMGWFRQTPGKEREFVAG | |
| | | ISSGGGGTAYAGSVKDRFTIFRDNA | |
| | | KNTVYLQMNSLKPEDTAVYYCARAV | |
| | | RSWGRAAEHDYWGQGTQVTVSS | |
| 953 | NBX22126 | QVQLQESGGGLVQAGVSLTLSCAAS | CnaA |
| | | GRTASTSTMAWFRQPPGKEREFVGV | |
| | | WSGGSTNYVNDRLIISRDNAKNTVY | |
| | | LQMNSLKPEDTAVYYCAASPRIWYR | |
| | | DTNYKRATWYDYWGQGTQVTVSS | |
| 954 | NBX22127 | QVQLQESGGGLVQAGGSLRLSCAAS | CnaA |
| | | GRTFSDYAMAWFRQVPGKEREFVAS | |
| | | ISWSGGVTWYADSVKGRFTISRDNA | |
| | | KNTVYLQMNSLKPEDTAVYYCAADA | |
| | | RSDHASYYYPADFGFWGQGTQVTVS | |
| | | S | |
| 955 | NBX22128 | QVQLQQSGGGLVQAGGSLRLSCAAS | CnaA |
| | | GRTFSGYIMAWFRQAPGKEREFVAA | |
| | | ISSSGATTAYSASVKDRFTISRDNA | |
| | | KNTSFLQMNNLKLEDTAAYYCAADQ | |
| | | FDSTARYDRRQYEYWGQGTQVTVSS | |
| 956 | NBX25006 | QVQLQQSGGGLVQAGGSLRLSCTAS | NetB |
| | | GSTLSTYAFNWFRQAPGKQRELVAT | |
| | | ISRGGKTTYADSVKGRFTVSRDNAK | |
| | | STVYLQMNSLKPEDTAVYYCDTVGY | |
| | | YPEIRSGQGTQVTVSS | |
| 957 | NBX25007 | QVQLQQSGGGLVQPGGSLRLSCAAS | NetB |
| | | GSIFGYAMGWYRQAPGKQREWVAEI | |
| | | SRGGTPNYADSVKGRFTISRDNAKN | |
| | | TVYLQMNSLKADDTAVYYCRCLGFD | |
| | | YWGQGTQVTVSS | |
| 958 | NBX25008 | QVQLQESGGGLVQAGGSLTLSCTAS | NetB |
| | | GSIFGIKAMGWYRQAPGKERDLVAQ | |
| | | ITEGGTTNYADSVKGRFTISRDTAK | |
| | | NTLYLQMNSLKPEDTAVYYCNSLWS | |
| | | LLEQYPRYFWGQGTQVTVSS | |
| 959 | NBX25009 | QVQLQESGGGLVQPGGSLRLSCAAS | NetB |
| | | GFTPVYYAISWFRQAPGKEREWVSC | |
| | | ISSVDGKTNYADSVKGRFTISRMNA | |
| | | KNTVYLQMNTLKPDDTAVYYCAAEG | |
| | | PPYDPGQLCPYNDMDYWGKGTLVTV | |
| | | SS | |
| 960 | NBX25010 | QVQLQESGGGSVRSGGSLTLSCTAS | NetB |
| | | LNSGSIAGMGWYRQAPGKERELVAG | |
| | | ITRGGSSNYGDSVKGRFTVSRDNAK | |
| | | NAMYLQMTSLKPEDTAVYRCFAYRK | |
| | | DDFGFEVLYWGQGTQVTVSS | |
| 961 | NBX25011 | QVQLQESGGGLVQAGGSLTLSCAAT | NetB |
| | | GSTFSNYAMNWYRQAPGKQRELVAT | |
| | | ISRGGVATYADSVKGRFTVSRDNAK | |
| | | NTVYLQANSLKPEDTALYYCDTVGY | |
| | | YSEVRQGQGTQVTVSS | |
| 962 | NBX25012 | QVQLQESGGGLVQAGGSLRLSCTAS | NetB |
| | | GSTLSTYAFNWFRQAPGKQRELVAT | |
| | | ISRGGRTTYAESAKGRFTVSRDNAK | |
| | | STVYLQMNSLKPEDTAVYYCDTVGY | |
| | | YPEIRSGQGTQVTVSS | |
| 963 | NBX25013 | QVQLQQSGGGSVQAGGSLRLSCAGS | NetB |
| | | GITFSAYAMGWYRQAPGKQRELVAD | |
| | | ISRAGITTYGDSVKGRFIISRDNEK | |
| | | NTVYLQMNSLKPEDTAVYYCRTLGF | |
| | | AYWGQGTQVTVSS | |
| 964 | NBX25014 | QVQLQESGGGSVQAGGSLRLSCAGS | NetB |
| | | GITFSAYAMGWYRQAPGKQRELVAD | |
| | | ISRAGITTYGDSVKGRFIISRDNEK | |
| | | NTVYLQMNSLKPEDTAVYYCRTLGF | |
| | | PYWGQGTQVTVSS | |
| 965 | NBX25015 | QVQLQESGGGLVQPGESLRLSCVAS | NetB |
| | | GSIAPYAMGWYRQAPGQQREWVAHI | |
| | | SRGSLPDYADSVKGRFFISRDNAKN | |
| | | TVYLQMNSLKPEDTAVYQCRTLGFD | |
| | | YWGQGTQVTVSA | |
| 966 | NBX25016 | QVQLQQSGGGLVQAGGSLRLSCAAS | NetB |
| | | GSTFSSYVMGWYRQAPGKQRELVAG | |
| | | ISSGGSTNYADSVKGRFTISRDNVK | |
| | | NTVSLQMNSLKPEDTAVYYCNLRDR | |
| | | FGHGYWGQGTQVTVSS | |
| 967 | NBX25017 | QVQLQQSGGGLVQPGGSLRLSCAGS | NetB |
| | | GTTLSNYAMGWYRQAPGKQRESVAD | |
| | | ISRGGTPDYADSVKGRFTISRDNAK | |
| | | NTVTLQMNRLEPEDTAVYYCKILGF | |
| | | DVWGQGTQVTVSS | |
| 968 | NBX25018 | QVQLQESGGGSVRAGGSLRLSCTAS | NetB |
| | | LNSGSIAGMGWYRQAPGKERELVAG | |
| | | ITRGGSSNYGDSVKGRFTVSRDNAK | |
| | | NTLYLQMSSLKPEDTAVYYCFAYRK | |
| | | DDFGFEVLYWGQGTQVTVSS | |
| 1791 | NBX0572 | QVQLQQSGGGSVQAGGSLRLSCAAS | CnaA |
| | | RPTISGYAMGWFRQAPGKEREFVAA | |
| | | ISGSGASTGYSNSVKGRFTVFRDNT | |
| | | QDTVYLQMNSLKPEDTAIYFCAVYS | |
| | | APDPTFDHYHMYSANYDNWGQGTQV | |
| | | TVSS | |
| 1792 | NBX0573 | QVQLQESGGGLVQAGTTLRLSCAVS | CnaA |
| | | GPTISSYAVGWFRQAPGKEREFVGV | |
| | | SWSASSTVYADSMKGRFAISRDNAK | |
| | | NTVSLQMNSLRPEDTAIYYCASMRA | |
| | | SYCAGYRCHQRAQTYDYWGQGTQVT | |
| | | VSS | |
| 1793 | NBX0575 | QVQLQESGGGLVQAGDSLRVSCLAS | CnaA |
| | | RRTLSSYVMGWFRQAPGKGREFVGG | |
| | | ISKDGRSTRYANFVEGRFTVSRDNA | |
| | | KNTVYLQMNSLKPEDTATYYCAASD | |
| | | YNGGGIPSLRLDYNYWGQGTQVTVS | |
| | | S | |
| 1794 | NBX0576 | QVQLQQSGGGLVQAGGSLRLSCAAT | CnaA |
| | | GSTNTFNKMDWYRQAPAKQRELVAT | |
| | | PMSRGDPYYADSVKGRFTISGDNAK | |
| | | NAVYLQMNNLKPEDTAVYYCRGRIG | |
| | | ERVYWGQGTQVTVSS | |
| 1795 | NBX0577 | QVQLQESGGGMVQAGGSLRLSCVAS | CnaA |
| | | GRAIGELSMGWYRQAPGKQRELVAR | |
| | | AIWSGGTVYGDSVRGRFTISRDSAK | |
| | | NTVYLQMNDLKPEDTALYYCNVGAN | |
| | | YWGQGTQVTVSS | |

TABLE 2
Unique SEQ IDs for V_{H}H CDRs of this disclosure

| | CDR1 Amino | CDR1 | CDR2 Amino | CDR2 | CDR3 Amino | CDR3 | |
|---|---|---|---|---|---|---|---|
| | Acid | SEQ ID | Acid | SEQ ID | Acid | SEQ ID | |
| NBX | Sequence | NO: | Sequence | NO: | Sequence | NO: | Antigen |
| NBX0301 | QRASSLFAM | 57 | ISWNGDKS | 107 | AAHRASFELGF | 157 | NetB |
| | | | | | ATHDYDF | | |
| NBX0302 | GSIFSISSA | 58 | IFSDGST | 108 | AVDGY | 158 | NetB |
| NBX0303 | GRTLSYWTM | 59 | INWSSGT | 109 | AAHRASFGLGY | 159 | NetB |
| | | | | | QTHEYDF | | |
| NBX0304 | GGTFSSYTM | 60 | ITWNSEVT | 110 | AAGRAGSGFTS | 160 | NetB |
| NBX0305 | GFTLDKYAV | 61 | ISSIDDST | 111 | MTIPLPYGSTCD | 161 | NetB |
| | | | | | IPSRSDLLAINY | | |
| NBX0306 | GFTVPYYYI | 62 | IASSSGKA | 112 | AALRKYGSTCYL | 162 | NetB |
| | | | | | HVLEYDY | | |
| NBX0309 | GSTFNNYMI | 63 | ISGSGAGT | 113 | ARRMSRSGIFGL | 163 | NetB |
| | | | | | RDYDS | | |
| NBX0311 | GRTFSNADM | 64 | ISWSGGRT | 114 | AAGGYSNLPTS | 164 | NetB |
| | | | | | YGY | | |
| NBX0316 | GRAFSTYGM | 65 | ISSSGAGS | 115 | AASTTSWGKFA | 165 | CnaA |
| | | | | | HYIY | | |
| NBX0317 | GGTFSSYIM | 66 | ISWSGGVT | 116 | AADSRISAGGSY | 166 | CnaA |
| | | | | | YEADFGS | | |
| NBX0318 | GSIMSIRVM | 67 | MSRGNTI | 117 | AALLDSYY | 167 | NetB |
| NBX0319 | ASIISIRVM | 68 | MSRGGTI | 118 | TALLDSYY | 168 | NetB |
| NBX0320 | GSIFSIRVM | 69 | MSRGGTI | 119 | AALLDSYY | 169 | NetB |
| NBX0321 | GFTLDKYAV | 70 | ISSIDDST | 120 | MTIPLPYGSTCR | 170 | NetB |
| | | | | | IPSRSDLLAINY | | |
| NBX0322 | GRTFSTYAM | 71 | ITRGGNT | 121 | AADRIIVPRDP | 171 | NetB |
| | | | | | MDY | | |
| NBX0326 | GRTFSAIHM | 72 | ISWSGGGT | 122 | AASDTDWGRS | 172 | CnaA |
| | | | | | ASYDY | | |
| NBX0327 | GGTFSSYVM | 73 | ISWSGGVT | 123 | AADSRISAGGSY | 173 | CnaA |
| | | | | | YEADFGS | | |
| NBX0328 | GRTFSSYTM | 74 | ISWSGT | 124 | AVGSRRLYYSSD | 174 | Cpa |
| | | | | | INY | | |
| NBX0329 | GLTVSRYTM | 75 | ISWSGT | 125 | AAGSRRLYYSN | 175 | Cpa |
| | | | | | DINY | | |
| NBX0330 | SRTFSNYAM | 76 | INGDTTFT | 126 | AARQWNPTMR | 176 | Cpa |
| | | | | | ERDYGY | | |
| NBX0331 | GRVFENYFM | 77 | TNWNTATN | 127 | AATGSRTYDVV | 177 | Cpb2 |
| | | | WNT | | DYYDY | | |
| NBX0332 | GRTFSSYSM | 78 | ITYSGITT | 128 | AASYSASRSYPF | 178 | Cpb2 |
| | | | | | GEYDY | | |
| NBX0333 | GRTFSSYSM | 79 | ITYSGIST | 129 | AASYSASRSYPF | 179 | Cpb2 |
| | | | | | GEYDY | | |
| NBX0334 | GFTFSNSAM | 80 | INIGGDSR | 130 | AKGLASTI | 180 | Cpb2 |
| NBX0335 | GFTFSNSAM | 81 | IEVGGGR | 131 | SKGLASTI | 181 | Cpb2 |
| NBX0336 | GFTFSNSAM | 82 | IGIDGGR | 132 | AKGLASTI | 182 | Cpb2 |
| NBX0337 | GFTFSNSAM | 83 | IGIGGGTT | 133 | AKGLASTI | 183 | Cpb2 |
| NBX0338 | GRSFSSYTM | 84 | ISWSGT | 134 | AVGSRRLYYSSD | 184 | Cpa |
| | | | | | INY | | |
| NBX0339 | GLTVSRYTM | 85 | ISWSGT | 135 | AAGSRRLHYSS | 185 | Cpa |
| | | | | | DINY | | |
| NBX0340 | GRTFSTSTL | 86 | IRYTSDYTART | 136 | AAAKYGMGYS | 186 | Cpa |
| | | | T | | DPSGYTY | | |
| NBX0341 | SRTFSNYAM | 87 | ITGDTAFT | 137 | AARQWNPTMR | 187 | Cpa |
| | | | | | ERDYGY | | |
| NBX0342 | GRRFRLYHM | 88 | ISWSGGTT | 138 | AVDRLIESFSDP | 188 | Cpb2 |
| | | | | | TAWPRM | | |
| NBX0343 | GFTFSNSAM | 89 | INIGGGTT | 139 | AKGLASTI | 189 | Cpb2 |
| NBX0344 | GFTFSNSAM | 90 | INIGGGTR | 140 | AKGLASTI | 190 | Cpb2 |
| NBX0345 | GRKFRLYHM | 91 | ISWSGGST | 141 | AVDRLIESFSDP | 191 | Cpb2 |
| | | | | | TAWPRM | | |
| NBX0346 | GFTFSNSAM | 92 | INIGGGT | 142 | AKGLASTI | 192 | Cpb2 |
| NBX0347 | GRTFSSYDM | 93 | ISYNI | 143 | AAVQRRGSYSY | 193 | Cpb2 |
| | | | | | DRAQSYDY | | |
| NBX0348 | GFTFSNSAM | 94 | IEIGGTR | 144 | AKGLASTI | 194 | Cpb2 |
| NBX0349 | GFTFSNSPM | 95 | INIGAGTT | 145 | AKGLASTI | 195 | Cpb2 |
| NBX0350 | GFTFSNSAM | 96 | INIGGGDK | 146 | AKGLASTI | 196 | Cpb2 |
| NBX0351 | GFTFSNSAM | 97 | IETGGTK | 147 | AKGLASTI | 197 | Cpb2 |
| NBX0352 | GFTFSNSPM | 98 | INIGEGTT | 148 | AKGLASTI | 198 | Cpb2 |
| NBX0353 | GFTFSNSPM | 99 | INIGGDTR | 149 | AKGLASTI | 199 | Cpb2 |
| NBX0354 | GFTFSNSAM | 100 | VNIDGGR | 150 | AKGLASTI | 200 | Cpb2 |
| NBX0355 | GFTFSNSAM | 101 | ISIDGGR | 151 | AKGLASTI | 201 | Cpb2 |
| NBX0356 | GGKFTLYHM | 102 | ISWSGRST | 152 | AVDRLIEKFSDP | 202 | Cpb2 |
| | | | | | TAWPRMDS | | |
| NBX0357 | GRTASM | 103 | ITRSSIYT | 153 | AADSTMSGSSR | 203 | Cpb2 |
| | | | | | YSSDYAY | | |
| NBX0358 | GFTFSNSPM | 104 | IDIGGNR | 154 | AKGLASTI | 20 | Cpb2 |
| NBX0359 | GRRFTLYHM | 105 | ISWSGGST | 155 | AVDRLIESFSDP | 205 | Cpb2 |
| | | | | | TAWPRMDY | | |
| NBX0360 | GRRFSLYHM | 106 | ISWSGGTT | 156 | AVDRLIESFSDP | 206 | Cpb2 |
| | | | | | TAWPRMDY | | |
| NBX0363 | ASIISIRVM | 341 | MSRGGTI | 459 | AALLDSYY | 577 | NetB |
| NBX0364 | GSIMSIRVM | 342 | MSRGGTI | 460 | TALLDSYY | 578 | NetB |
| NBX0365 | GSIFSIRVM | 343 | MSRGGTI | 461 | TALLDSYY | 579 | NetB |
| NBX0369 | ASIFSIRVM | 344 | MSRGNTI | 462 | AALLDSYY | 580 | NetB |
| NBX0370 | GSIMSIRVM | 345 | MSRGGTI | 463 | AALLDSYY | 581 | NetB |
| NBX0373 | ASIMSIRVM | 346 | MSRGNTI | 464 | AALLDSYY | 582 | NetB |
| NBX0374 | ASIMSIRVM | 347 | MSRGGTI | 465 | AALLDSYY | 583 | NetB |
| NBX0379 | GSIMSIRVM | 348 | MSRGNTI | 466 | AALLDSYY | 584 | NetB |
| NBX0380 | GSIISIRVM | 349 | MSRGGTI | 467 | AALLDSYY | 585 | NetB |
| NBX0381 | ASIISIRVM | 350 | MSRGNTI | 468 | AALLDSYY | 586 | NetB |
| NBX0501 | GSIFSINVM | 351 | ITSGGST | 469 | NAAQSRTSWLF | 587 | NetB |
| | | | | | PDEYDY | | |
| NBX0502 | GRTFSIYAM | 352 | INRGGGTT | 470 | AADRVTDTYYYL | 588 | NetB |
| | | | | | NPESYDY | | |
| NBX0503 | GSGRRVGYM | 353 | ISRAGAT | 471 | FASLIDAGTY | 589 | NetB |
| NBX0504 | GRTFSIYAM | 354 | INRSGGTT | 472 | AADRVTDTYYYL | 590 | NetB |
| | | | | | NPESYDY | | |
| NBX0505 | GMSFSLGTI | 355 | ITNADTT | 473 | NTATS | 591 | NetB |
| NBX0506 | GSGRRVGYM | 356 | ISRAGAT | 474 | FASVFDAGTY | 592 | NetB |
| NBX0507 | GSGRRVGYM | 357 | ISRAGAT | 475 | FASIFDAGTY | 593 | NetB |
| NBX0508 | GSGSRINYM | 358 | INRTGAA | 476 | FASYLGAGAY | 594 | NetB |
| NBX0509 | GRTFSTYTV | 359 | ITWNGGTI | 477 | VMGAAGQGW | 595 | NetB |
| | | | | | RY | | |
| NBX0510 | GSGSRINYM | 360 | INRTGAA | 478 | WASYLGAGTY | 596 | NetB |
| NBX0511 | GFTFSRNYM | 361 | IYSDDST | 479 | SKEGGL | 597 | NetB |
| NBX0512 | GSGRRVGYM | 362 | ISRAGAT | 480 | FASVFDAGTY | 598 | NetB |
| NBX0513 | GSGRRVGYM | 363 | ISRAGAT | 481 | FASLFDAGTY | 599 | NetB |
| NBX0514 | GRTFSGRTM | 364 | ITWSGGTT | 482 | ASDGPWRATTP | 600 | CnaA |
| | | | | | DAYDY | | |
| NBX0515 | GSIGTIDSM | 365 | IMFSGRT | 483 | YSNQY | 601 | CnaA |
| NBX0517 | EFSLLFGTI | 366 | VSSSDGST | 484 | ATRCTVVPGIT | 602 | CnaA |
| NBX0518 | GSITRVGGM | 367 | INEVGNT | 485 | WIPPIP | 603 | CnaA |
| NBX0519 | PFSLRLGVV | 368 | ISSSEGST | 486 | ATRCTVVPGIT | 604 | CnaA |
| NBX0520 | ARTSSSRAM | 369 | ISWSGGRT | 487 | AARRSDFTGDY | 605 | CnaA |
| | | | | | AYSGRSAYDY | | |
| NBX0521 | GSTFIFDKM | 370 | LMSRGDP | 488 | RGRAGERVY | 606 | CnaA |
| NBX0522 | GRTFSGVIV | 371 | TLWSGGST | 489 | AAKYGGSLSYM | 607 | CnaA |
| | | | | | HPTGYTY | | |
| NBX0523 | RIVFTISTM | 372 | INRSGALT | 490 | AASKANMPALP | 608 | CnaA |
| | | | | | ANYDY | | |
| NBX0524 | GSITRLGSM | 373 | ITAVGNT | 491 | WIPPIP | 609 | CnaA |
| NBX0525 | GSITRLGGM | 374 | IDTVGNT | 492 | WIPPIP | 610 | CnaA |
| NBX0526 | ERAFMYNM | 375 | RNWNVERT | 493 | ATTRVWPTQH | 611 | CnaA |
| | | | | | QMGQIEY | | |
| NBX0527 | SSFNTM | 376 | ITSGGTI | 494 | VADWQYGSTW | 612 | CnaA |
| | | | | | NY | | |
| NBX0528 | GRNFDYYSM | 377 | INWRGAVI | 495 | AAASSSSRLLEPI | 613 | CnaA |
| | | | | | GYNY | | |
| NBX0529 | GSMFSINDM | 378 | ISSGGTT | 496 | AGNLKRSETSYY | 614 | CnaA |
| | | | | | WK | | |
| NBX0530 | GRTFSRYHM | 379 | ISLSGGGT | 497 | TADRHEWGRL | 615 | CnaA |
| | | | | | MKGDY | | |
| NBX0531 | GRTSNSYNM | 380 | ISWTGGFT | 498 | AATSRSLTSAM | 616 | CnaA |
| | | | | | TREIRAYDY | | |
| NBX0532 | GSTFSFNKM | 381 | FMNDGNT | 499 | RGRAGMEVY | 617 | CnaA |
| NBX0533 | PLTLRLGPI | 382 | ISSRDDK | 500 | ATRCTVVPGIS | 618 | CnaA |
| NBX0534 | GRNFGYYTM | 383 | ITWRGVI | 501 | AAASSSSRPLEPI | 619 | CnaA |
| | | | | | GYNY | | |
| NBX0535 | GDIFSAAGM | 384 | VTWDGGTT | 502 | AAGNTGPFNLL | 620 | CnaA |
| | | | | | HSSAQYAY | | |
| NBX0536 | PLTLRLGAI | 385 | ITSTEDK | 503 | ATRCTVVPGIS | 621 | CnaA |
| NBX0537 | GSITRIGGM | 386 | INTVGNT | 504 | WIPPLP | 622 | CnaA |
| NBX0538 | GRSFSRYIM | 387 | IAPSGGSA | 505 | AARYDMDYEYK | 623 | NetB |
| | | | | | T | | |
| NBX0539 | GSGSRIGFM | 388 | INRTGAT | 506 | FASVVDAGTY | 624 | NetB |
| NBX0540 | GLTFSDYAM | 389 | ISLTAAST | 507 | AAQGRILRGRG | 625 | NetB |
| | | | | | LFKASDYDY | | |
| NBX0541 | GTISIFDPM | 390 | ISEGST | 508 | RLSRYYNSNIY | 626 | NetB |
| NBX0542 | RNIYGINVI | 391 | SANGGTT | 509 | KAELYTLQHNYE | 627 | NetB |
| | | | | | Y | | |
| NBX0543 | GTLSLFDPM | 392 | ISGLST | 510 | HLSRYYNSNIY | 628 | NetB |
| NBX0544 | GRVLSINAM | 393 | ITNGGST | 511 | LAEERPYYGGPL | 629 | NetB |
| | | | | | EY | | |
| NBX0545 | RTTFRVGTM | 394 | ITSGGST | 512 | FANIVDRPVS | 630 | NetB |
| NBX0546 | GSGSRIGLM | 395 | IKGTGTT | 513 | FASVLGAGTY | 631 | NetB |
| NBX0547 | GTISLFDSM | 396 | ITEGST | 514 | RLSRYYNSNIY | 632 | NetB |
| NBX0548 | ETSLNFDDM | 397 | INTFPAGTTA | 515 | NAGDY | 633 | NetB |
| NBX0549 | GSDSSINYM | 398 | ISRDGRS | 516 | YVDPLGRVPR | 634 | NetB |
| NBX0550 | GTVNLM | 399 | IKGTGTT | 517 | FASVLGAGTY | 635 | NetB |
| NBX0551 | GSIFSRNII | 400 | INTGGRT | 518 | NAPSLGY | 636 | NetB |
| NBX0552 | GSGSINYM | 401 | INRTGAA | 519 | FASALGAGVY | 637 | NetB |
| NBX0553 | GSGWRVGYM | 402 | ISRAGAT | 520 | FASIIDAGTY | 638 | NetB |
| NBX0561 | GENFSTYVM | 403 | HNWRGGGT | 521 | AARSGGSYTYT | 639 | CnaA |
| | | | | | GSYHY | | |
| NBX0801 | GRTFSSYAM | 404 | ISRSGGST | 522 | AANRYGSSSYQ | 640 | CnaA |
| | | | | | GQYAS | | |
| NBX0802 | GRTFSSYHM | 405 | ISRSGGFT | 523 | AAQQWPDPRN | 641 | CnaA |
| | | | | | PNGYDY | | |
| NBX0803 | GRTFINYGM | 406 | VSISGAGT | 524 | AAAKAGHWGR | 642 | CnaA |
| | | | | | DANYDY | | |
| NBX0804 | GRTLTAYGM | 407 | VSLSGAST | 525 | AAAKAGQWGR | 643 | CnaA |
| | | | | | DAKYDY | | |
| NBX0805 | GRTFSTYAM | 408 | ISWSGGRI | 526 | TADLKGLWALG | 644 | CnaA |
| | | | | | LPGHYASWDS | | |
| NBX0806 | GSIGSINIM | 409 | FTSGGST | 527 | RARRGWAIY | 645 | CnaA |
| NBX0807 | GRTFSSYGM | 410 | ISRTGSGT | 528 | AADSGGSWGR | 646 | CnaA |
| | | | | | GTTYDY | | |
| NBX0808 | ARASSIGAM | 411 | VTAGADTT | 529 | AAYNTAGWGE | 647 | CnaA |
| | | | | | PHQSYRY | | |
| NBX0809 | GLTFGNYDM | 412 | ISSSGAYT | 530 | AGRRSVVVRSF | 648 | CnaA |
| | | | | | DYDY | | |
| NBX0810 | GRIFNANGM | 413 | LYRSGST | 531 | NVNWALHDS | 649 | CnaA |
| NBX0811 | ERTFSSDGM | 414 | ISRTGSAT | 532 | AANSGGHWW | 650 | CnaA |
| | | | | | RGATYDY | | |
| NBX0812 | GTIFSANGM | 415 | LYRDGST | 533 | NVNWALHDS | 651 | CnaA |
| NBX0847 | TRASIVGAM | 416 | IAAGSPSTP | 534 | AAYNTANWGQ | 652 | CnaA |
| | | | | | PHQSYRH | | |
| NBX0866 | GSILNINVM | 417 | IYRDGST | 535 | NVVTYGSNRRD | 653 | CnaA |
| | | | | | F | | |
| NBX0867 | GRTFSSYAM | 418 | ISRSGGST | 536 | AANRYGSSSYQ | 654 | CnaA |
| | | | | | GQYGS | | |
| NBX0868 | GRTFSSYAM | 419 | ISRSGGST | 537 | AANRYGSSSYQ | 655 | CnaA |
| | | | | | GQYDY | | |
| NBX0869 | GTIFSINGM | 420 | LYRGGST | 538 | NVNWALQDS | 656 | CnaA |
| NBX0870 | TSDGSINVM | 421 | ITSLGSQ | 539 | RARRGWAIY | 657 | CnaA |
| NBX0871 | GRTFNIYAM | 422 | ISDSGGSA | 540 | AADLTGLWALG | 658 | CnaA |
| | | | | | LPGHYASWDS | | |
| NBX0872 | GFTFRSSAM | 423 | IGSDGENI | 541 | QLGRTVLDYF | 659 | CnaA |
| NBX0873 | GRTFINYGM | 424 | VSSSGAGT | 542 | AAAKAGQWGR | 660 | CnaA |
| | | | | | YANYDY | | |
| NBX0874 | GRTFSSYAM | 425 | ISRSGGTT | 543 | AANPYGSSSYQ | 661 | CnaA |
| | | | | | GQYGS | | |
| NBX0875 | GRAFSGYAM | 426 | ISRGGGTT | 544 | AANRYGSSSYQ | 662 | CnaA |
| | | | | | GQYGS | | |
| NBX0876 | GRTFINYGM | 427 | VSSSGAGT | 545 | AAAKAGHWGR | 663 | CnaA |
| | | | | | DANYDY | | |
| NBX0877 | GSISSITFM | 428 | IARSGTT | 546 | YVDRRGAVPT | 664 | NetB |
| NBX0878 | GSISSITFM | 429 | IARSGTT | 547 | YVDRRDVVPT | 665 | NetB |
| NBX0879 | GTGFPIITFM | 430 | ISRGGVA | 548 | YADRFSGSPT | 666 | NetB |
| NBX0880 | VSSIGTM | 431 | ISRVGTT | 549 | FANVISGPVY | 667 | NetB |
| NBX0881 | TRFFSNYAM | 432 | ISRDGAVP | 550 | AASRQGNPYAQ | 668 | NetB |
| | | | | | TSYDY | | |
| NBX0883 | GSADSIKIM | 433 | ITSGGTT | 551 | NALVSRRDSAA | 669 | NetB |
| | | | | | YFA | | |
| NBX0884 | ESIVSITPM | 434 | TTRDGAP | 552 | KARKDSHDY | 670 | NetB |
| NBX0885 | ETIGSIQRM | 435 | RTNGGTT | 553 | NAHIREYYSTYD | 671 | NetB |
| | | | | | Y | | |
| NBX0886 | GSISRIRDI | 436 | ISSGGST | 554 | NALFNPIDGPA | 672 | NetB |
| | | | | | RYY | | |
| NBX0887 | GSISRIYDM | 437 | ISRGGST | 555 | TALFNPVDGTA | 673 | NetB |
| | | | | | RYY | | |
| NBX0888 | GTIFSINVM | 438 | ITSGGQI | 556 | NAASSTWPPRD | 674 | NetB |
| | | | | | YDY | | |
| NBX0889 | RSISSIAAM | 439 | ITNGGST | 557 | NADERPYYGDS | 675 | NetB |
| | | | | | VLS | | |
| NBX0890 | GTGFPIITFM | 440 | INRGGVA | 558 | YADRFSGSPT | 676 | NetB |
| NBX0891 | GRTFSNYHM | 441 | ISRGTSTT | 559 | AADADRSTTIYS | 677 | NetB |
| | | | | | RDIYDY | | |
| NBX0892 | EGTFSNYRM | 442 | ISRDGAVP | 560 | AASRQGLPYVE | 678 | NetB |
| | | | | | TSYDY | | |
| NBX0893 | GSISSITFM | 443 | SARRGTT | 561 | YVDRRDEVPT | 679 | NetB |
| NBX0894 | GGTFSSYVM | 444 | IRWSRGST | 562 | AADGNPAKLVL | 680 | NetB |
| | | | | | DQYGMDY | | |
| NBX0895 | GSISEITYM | 445 | IARVGTT | 563 | YVDQRGVVPT | 681 | NetB |
| NBX0896 | ARASSIGAM | 446 | VNAGADTT | 564 | AAYNTAGWGE | 682 | CnaA |
| | | | | | PHQSYRY | | |
| NBX0897 | GSIFIISTM | 447 | ITSGGST | 565 | NAEVHVWGVP | 683 | CnaA |
| | | | | | GPRDY | | |
| NBX0898 | GRTFSSYAM | 448 | ISRSGGST | 566 | AANPYGSSSYQ | 684 | CnaA |
| | | | | | GQYAS | | |
| NBX0899 | GSIFSSNGM | 449 | LYRSGST | 567 | NVNWALHDS | 685 | CnaA |
| NBX08100 | GRTFSAYGM | 450 | VSGGGGGT | 568 | AAATAGHWGR | 686 | CnaA |
| | | | | | DANYDY | | |
| NBX08101 | GSIFSSNGM | 451 | LFRSGST | 569 | NVNWALHDS | 687 | CnaA |
| NBX08102 | GRTFSSYAM | 452 | ISRSGGTT | 570 | AANPYGSSSYQ | 688 | CnaA |
| | | | | | GQYGS | | |
| NBX08103 | GIIHSINVM | 453 | ISSGGRT | 571 | TMVWGLRYY | 689 | CnaA |
| NBX08104 | TSIFSSNGM | 454 | LFRSGST | 572 | NVNWALHDS | 690 | CnaA |
| NBX08105 | GRTFSSYAM | 455 | ISRGGGTT | 573 | AANPYGSSSYQ | 691 | CnaA |
| | | | | | GQYGS | | |
| NBX08106 | GSIFSSNGM | 456 | LYRSGST | 574 | NVNWALHDS | 692 | CnaA |
| NBX08107 | GSIFSSNGM | 457 | LYRSGST | 575 | NVNWALHDS | 693 | CnaA |
| NBX08108 | RSILSANGM | 458 | LYRSGST | 576 | NVNWALHDS | 694 | CnaA |
| NBX03161 | GRSLSTVSM | 969 | IAWSGGRT | 1243 | AGYRGVLFITTK | 1517 | Cpa |
| | | | | | SAYDY | | |
| NBX03162 | GFTFSSYWM | 970 | ISTGGTST | 1244 | AKLVAYGMDY | 1518 | Cpa |
| NBX03163 | GRTFSRYTM | 971 | ISWSGT | 1245 | AVGSRRLYYSSD | 1519 | Cpa |
| | | | | | INY | | |
| NBX03164 | GRTFSSYTM | 972 | ISWSGT | 1246 | VVGSRRLYYSSD | 1520 | Cpa |
| | | | | | INY | | |
| NBX03165 | ERTFSRYTM | 973 | ISWSGT | 1247 | AQGSRRLYYSSD | 1521 | Cpa |
| | | | | | IDY | | |
| NBX03166 | GFIVNSYWM | 974 | ISTNAYST | 1248 | ARGGTAQEGG | 1522 | Cpa |
| | | | | | MDY | | |
| NBX03167 | GHDFSKYTM | 975 | ISWSGT | 1249 | AVGSRRLYYSSD | 1523 | Cpa |
| | | | | | IDY | | |
| NBX03168 | GFTFSRYTM | 976 | ISWSGT | 1250 | ASGSRRLYYSSD | 1524 | Cpa |
| | | | | | IDY | | |
| NBX03169 | GRTFSRYTM | 977 | ISWSGT | 1251 | ASGSRRLYYSSD | 1525 | Cpa |
| | | | | | IDY | | |
| NBX03170 | GRTFSRYTM | 978 | ISWSGT | 1252 | VVGSRRLYYSSD | 1526 | Cpa |
| | | | | | IDY | | |
| NBX03171 | GRDFSRYTM | 979 | ISWSGT | 1253 | AVGSRRLYYSSD | 1527 | Cpa |
| | | | | | IDY | | |
| NBX03172 | GTFSSYTM | 980 | ISWSGT | 1254 | AVGSRRLYYSSD | 1528 | Cpa |
| | | | | | INY | | |
| NBX03173 | GRTFSSYAM | 981 | LSGSGATT | 1255 | AASGHFGLRGT | 1529 | Cpa |
| | | | | | YNYEY | | |
| NBX03174 | GRTGIKWTM | 982 | ITWSGDT | 1256 | AADRIYNEDRYY | 1530 | Cpa |
| | | | | | Y | | |
| NBX03175 | GSIFRIIAM | 983 | ITNGGAT | 1257 | AADHFGRTPY | 1531 | Cpa |
| NBX03176 | GRTFSSYTM | 984 | ISWSGT | 1258 | AVGSRRLYYSSD | 1532 | Cpa |
| | | | | | IDY | | |
| NBX03177 | SRTFSNYAM | 985 | ISGVTAFT | 1259 | AARQWNPTMR | 1533 | Cpa |
| | | | | | ERDYDY | | |
| NBX03179 | GRSFSRYTM | 986 | ISWSGT | 1260 | AVGTRRLYYSSD | 1534 | Cpa |
| | | | | | IDY | | |
| NBX03180 | GLTVSRYTM | 987 | ISWSGT | 1261 | AAGSRRLHYSS | 1535 | Cpa |
| | | | | | DIDY | | |
| NBX03181 | GLTFSRYTM | 988 | ISWSGT | 1262 | VVGSRRLYYSSD | 1536 | Cpa |
| | | | | | INY | | |
| NBX0570 | GTGRRFGYM | 989 | ISRAGAT | 1263 | FASVFDAGTY | 1537 | NetB |
| NBX0571 | GSIFSINVM | 990 | ATSGGMT | 1264 | NAAQSRTSRLFP | 1538 | NetB |
| | | | | | DEYDY | | |
| NBX0578 | GRDFSTYVM | 991 | SNWNDGGT | 1265 | AARSGGSYTYT | 1539 | CnaA |
| | | | | | GSYHY | | |
| NBX0579 | RTLYNNAM | 992 | ISSSGIST | 1266 | AASRAATVGVT | 1540 | CnaA |
| | | | | | PQEYAY | | |
| NBX0580 | GRTISNYGV | 993 | SWSASST | 1267 | AMMGASYCAG | 1541 | CnaA |
| | | | | | YRCHHAAQTYD | | |
| | | | | | Y | | |
| NBX0581 | GPPSRRYDM | 994 | VSWTGSST | 1268 | AVKNTYGSSSYY | 1542 | CnaA |
| | | | | | YTSSSYDY | | |
| NBX0582 | GEIDSAAGM | 995 | VTWDGGTT | 1269 | AAGNTGPFNLL | 1543 | CnaA |
| | | | | | YSSAQYLY | | |
| NBX0584 | GSMFSIHDM | 996 | VSSDGTT | 1270 | MGNLRRLDSGY | 1544 | CnaA |
| | | | | | ADSYYYK | | |
| NBX0585 | GRTADRYAI | 997 | IERSGGAT | 1271 | AARLALAGEYD | 1545 | CnaA |
| | | | | | Y | | |
| NBX0586 | GGSIRTDRYYW | 998 | IAWTAST | 1272 | VPIVGDSSWSG | 1546 | Cpa |
| | | | | | GS | | |
| NBX0587 | GIIFSINAM | 999 | ITGRGRT | 1273 | NEARNGLGSPA | 1547 | Cpa |
| | | | | | NS | | |
| NBX08116 | GSIFSIYTM | 1000 | ITSGGTTNY | 1274 | NALVNQRDGLA | 1548 | NetB |
| | | | | | TYY | | |
| NBX08117 | GSISSISGM | 1001 | ITSYGST | 1275 | HAVQGSTWW | 1549 | NetB |
| | | | | | GSGS | | |
| NBX08118 | SIGSIHRM | 1002 | ITNGGST | 1276 | YANIREYYSSYEY | 1550 | NetB |
| NBX08119 | GRTFSSYAM | 1003 | INRSGGTT | 1277 | AADRVGDDYYY | 1551 | NetB |
| | | | | | ISSQHYDY | | |
| NBX08120 | GTRGSINPV | 1004 | STGGAT | 1278 | NTESY | 1552 | NetB |
| NBX08121 | GRTFNGKGM | 1005 | INWSGDST | 1279 | AVSTYSTYWFTP | 1553 | NetB |
| | | | | | ARYDY | | |
| NBX08122 | GMTFSDHAM | 1006 | IGRGGTT | 1280 | NVVPLRAGIDTY | 1554 | NetB |
| NBX08123 | GSGRRVGYM | 1007 | ISRAGAT | 1281 | FASIIDAGTY | 1555 | NetB |
| NBX08124 | GIISSITYM | 1008 | IARSGAT | 1282 | YIDQRDVVPT | 1556 | NetB |
| NBX08125 | QSIFRINAM | 1009 | ITSGGVT | 1283 | HARSWSADY | 1557 | NetB |
| NBX08126 | GIMLRDEAL | 1010 | ITRGGAT | 1284 | RIIGTDT | 1558 | NetB |
| NBX08127 | GDTISSYTM | 1011 | ITWSGEVT | 1285 | AAGRAGTNWN | 1559 | NetB |
| | | | | | Y | | |
| NBX08128 | RIISSITDM | 1012 | RGGRI | 1286 | SALSSGKYY | 1560 | NetB |
| NBX08129 | APLNSIHAM | 1013 | STNGGST | 1287 | YAEVRHYSGNV | 1561 | NetB |
| | | | | | DQY | | |
| NBX08138 | GRIFGINGW | 1014 | LYRSGGT | 1288 | NVNWAESDS | 1562 | CnaA |
| NBX08139 | RGTFSNLGL | 1015 | LKRDGNRT | 1289 | AARLPRPNAVV | 1563 | CnaA |
| | | | | | DTTSEYDY | | |
| NBX08140 | GRTFNM | 1016 | ISGSGGIT | 1290 | AVARFGGAWV | 1564 | CnaA |
| | | | | | Y | | |
| NBX08141 | GRTFSDLGM | 1017 | ILSGTTRP | 1291 | AARTVGGLPI | 1565 | CnaA |
| NBX08142 | DTIFSSNGM | 1018 | LYRDGNT | 1292 | NINWPLHDS | 1566 | CnaA |
| NBX08143 | RGTFNNYGL | 1019 | LTRLGGRT | 1293 | AARLPRTNAVV | 1567 | CnaA |
| | | | | | DDISEYTY | | |
| NBX08144 | RGTFNNLGM | 1020 | LKRDGIRT | 1294 | AARLPRTNAVV | 1568 | CnaA |
| | | | | | DSTSEYDY | | |
| NBX08145 | GRIFGINGW | 1021 | YRSGGT | 1295 | NVNWAESDS | 1569 | CnaA |
| NBX08149 | GSPLSINVM | 1022 | ITSGGQT | 1296 | NARDATYYVEY | 1570 | NetB |
| | | | | | NY | | |
| NBX08150 | ARTFSDYAM | 1023 | IRENGGRT | 1297 | AAGRDRYLRFSP | 1571 | NetB |
| | | | | | DY | | |
| NBX08151 | GTIGSINPV | 1024 | STAGAT | 1298 | NTESY | 1572 | NetB |
| NBX08152 | GRTFSGYGM | 1025 | TWNEGST | 1299 | AASTAGYGLGS | 1573 | NetB |
| | | | | | SPNEYEY | | |
| NBX08153 | GRTFTRYGM | 1026 | INGRGDST | 1300 | AVSFTSTFWFSP | 1574 | NetB |
| | | | | | AQYDY | | |
| NBX08154 | GSLFSFETM | 1027 | TTGASP | 1301 | VRERVGSKEY | 1575 | NetB |
| NBX08155 | GLIFSASPM | 1028 | ISASGMIT | 1302 | NAPRANSDWP | 1576 | NetB |
| | | | | | RENS | | |
| NBX08156 | GFTLSSYYI | 1029 | FSNSDGNI | 1303 | AVGYACDYHEL | 1577 | NetB |
| | | | | | RQRFSS | | |
| NBX08157 | RSISSIQAM | 1030 | ITNGGTT | 1304 | NADERPYYGDA | 1578 | NetB |
| | | | | | INS | | |
| NBX11001 | GFAFDTSPM | 1031 | IFSDGST | 1305 | AMSGV | 1579 | CnaA |
| NBX11002 | GFTLDTYAV | 1032 | ISASGSMT | 1306 | AASTRPLCSRGG | 1580 | CnaA |
| | | | | | NYDY | | |
| NBX11003 | GFTLDYSAI | 1033 | ISSSGAYT | 1307 | AARSGVCSRSSS | 1581 | CnaA |
| | | | | | DFGS | | |
| NBX11004 | GGSITTNPYYW | 1034 | IDYSGST | 1308 | ARSLRPVVTAKR | 1582 | CnaA |
| | | | | | DDEY | | |
| NBX11005 | GSIFSINAM | 1035 | INWSGGIT | 1309 | AADLRVGASGPI | 1583 | CnaA |
| | | | | | SFAWAYDY | | |
| NBX11006 | GFSLDNYDI | 1036 | ISRSGGTT | 1310 | APVDITGPGRC | 1584 | CnaA |
| | | | | | PPARYEYGY | | |
| NBX11007 | GFAFDRSAM | 1037 | IFSDGST | 1311 | ATSGI | 1585 | CnaA |
| NBX11008 | GFAFDSSAM | 1038 | IFKDGST | 1312 | ATSGI | 1586 | CnaA |
| NBX11009 | GIGPNAI | 1039 | ISRSGGYT | 1313 | AADAGNFPSRN | 1587 | CnaA |
| | | | | | PVTYGY | | |
| NBX11010 | GFAFDRSPM | 1040 | IFSDGST | 1314 | ATSGI | 1588 | CnaA |
| NBX11011 | GFTLDYYAI | 1041 | ISSSGAYE | 1315 | AAARGGCPPNT | 1589 | CnaA |
| | | | | | YYSGSSYFWEY | | |
| | | | | | DF | | |
| NBX11012 | GFNLNYYDI | 1042 | ISRSGGTE | 1316 | APVDITGPGRC | 1590 | CnaA |
| | | | | | PPARYAYGS | | |
| NBX11013 | GFAFDSSPM | 1043 | IFKDGST | 1317 | ATSGI | 1591 | CnaA |
| NBX11014 | GFAFDSSPM | 1044 | IFKDGTT | 1318 | AMSGV | 1592 | CnaA |
| NBX11015 | GFAFDTSPM | 1045 | IFKDGST | 1319 | ATSGI | 1593 | CnaA |
| NBX11016 | GFNLDNYHI | 1046 | ISSSGGLT | 1320 | GRVNYCARDM | 1594 | CnaA |
| | | | | | SAYDT | | |
| NBX11017 | GFTRDYYTI | 1047 | ISSSDGWT | 1321 | AAAYDTAGWG | 1595 | CnaA |
| | | | | | AGGMDY | | |
| NBX11018 | GSIFSINAM | 1048 | ITWSGGST | 1322 | AADTRRWAGG | 1596 | CnaA |
| | | | | | SSWYGEEYDY | | |
| NBX11019 | GFTLDYYTI | 1049 | ISRSGAMT | 1323 | AATVKSVCFRG | 1597 | CnaA |
| | | | | | ELYDY | | |
| NBX11020 | EFSLANYAI | 1050 | ISSSGNYM | 1324 | ARARSGCSRNM | 1598 | CnaA |
| | | | | | YDSTDY | | |
| NBX11021 | GFTLDYYAI | 1051 | ISSSDGST | 1325 | AAIGSGPLTAQ | 1599 | CnaA |
| | | | | | GMCVMTRTPR | | |
| | | | | | DYDY | | |
| NBX11022 | GFAFDRSPM | 1052 | SLPDGST | 1326 | ATSGV | 1600 | CnaA |
| NBX11023 | GFAFDRSAM | 1053 | IFSDGTT | 1327 | ATSGI | 1601 | CnaA |
| NBX11024 | GFTFDSYVM | 1054 | ISQGGGAT | 1328 | AKGGLADGTGF | 1602 | CnaA |
| | | | | | YGSPGALI | | |
| NBX11025 | GFTFNTYVM | 1055 | ISQGGAAT | 1329 | AQGGLADGSGF | 1603 | CnaA |
| | | | | | YGSPGALI | | |
| NBX11026 | GFTLDYYAI | 1056 | IMSSDGYT | 1330 | AAAYDTAGWG | 1604 | CnaA |
| | | | | | ADGMDY | | |
| NBX11027 | GFAFDTSPM | 1057 | IFEDGTT | 1331 | ATSGI | 1605 | CnaA |
| NBX11028 | GSIFSINGM | 1058 | ISWSGSIT | 1332 | AADIRVGASGPI | 1606 | CnaA |
| | | | | | SFAWAYDY | | |
| NBX11029 | GFILDYYAI | 1059 | ISSSDGST | 1333 | AAVGSGPLSAQ | 1607 | CnaA |
| | | | | | GMCVMTRTSR | | |
| | | | | | DADY | | |
| NBX11032 | GFTLDGYAI | 1060 | ISPSGGMT | 1334 | KVMPLCDRMW | 1608 | CnaA |
| | | | | | SPLGGS | | |
| NBX11033 | GFTLEAYAI | 1061 | ISRSGGLT | 1335 | AAKQTQCSRW | 1609 | CnaA |
| | | | | | NPEYEY | | |
| NBX11034 | GFTFEASAM | 1062 | IFSDGTT | 1336 | ATSGI | 1610 | CnaA |
| NBX11035 | GGSITTNSYYW | 1063 | IDYSGST | 1337 | ARSLRPVVTAKR | 1611 | CnaA |
| | | | | | DDEY | | |
| NBX11036 | GFTFDAYVM | 1064 | ISQGGAAT | 1338 | AKGGLADGSGF | 1612 | CnaA |
| | | | | | YGSPGALI | | |
| NBX11037 | GFAFEASAM | 1065 | IFSDGTT | 1339 | ATSGI | 1613 | CnaA |
| NBX11038 | GGSITTNSYYW | 1066 | IDYSGNT | 1340 | ARSVRPVVTAK | 1614 | CnaA |
| | | | | | GDNEY | | |
| NBX11039 | GFAFDTSPM | 1067 | SFSDGTT | 1341 | ATSGI | 1615 | CnaA |
| NBX11040 | GGSITTNTYYW | 1068 | IDYSGST | 1342 | ARSVRPVVTAK | 1616 | CnaA |
| | | | | | SDDEY | | |
| NBX11041 | GGSITTNSYYW | 1069 | IDYSGNT | 1343 | ARSVRPVVTAK | 1617 | CnaA |
| | | | | | SDNEY | | |
| NBX11042 | GGSITTNSYYW | 1070 | IDYSGNT | 1344 | ARSVRPVVTAK | 1618 | CnaA |
| | | | | | RDNEY | | |
| NBX11043 | GFAFDSSAM | 1071 | ILSDGST | 1345 | ATSGI | 1619 | CnaA |
| NBX11044 | GFAFDSSPM | 1072 | IFGDGST | 1346 | AMSGV | 1620 | CnaA |
| NBX11045 | GFTLDYYDI | 1073 | IEGSGGST | 1347 | AVASSGSIGLCT | 1621 | CnaA |
| | | | | | VGRNAYNY | | |
| NBX11046 | GISRNAI | 1074 | ISRSGGYT | 1348 | AADAGNFPSRN | 1622 | CnaA |
| | | | | | PVTYGY | | |
| NBX11047 | GFTLDYYAI | 1075 | ISSSDGST | 1349 | AAVGSGPLSAQ | 1623 | CnaA |
| | | | | | GMCVMTRTPR | | |
| | | | | | DYDY | | |
| NBX11048 | GFAFDSSAM | 1076 | IFEDGST | 1350 | TTSGI | 1624 | CnaA |
| NBX11049 | GGSITTNHYYW | 1077 | IDYSGST | 1351 | ARSVRPVVTAK | 1625 | CnaA |
| | | | | | RDDEN | | |
| NBX11050 | GFAFDKSAM | 1078 | VFEDGST | 1352 | TTSGI | 1626 | CnaA |
| NBX11051 | GFTLEAYDI | 1079 | ISRSAGHT | 1353 | AAGQTQCTRW | 1627 | CnaA |
| | | | | | SSEYEY | | |
| NBX11052 | GFTFDRSPM | 1080 | IFEDGTT | 1354 | AMSGV | 1628 | CnaA |
| NBX11053 | GETLENYAI | 1081 | ISASGSTT | 1355 | ARTHQLCPRAR | 1629 | CnaA |
| | | | | | SPYDA | | |
| NBX11054 | GFTLDYYTI | 1082 | IMTSDDYT | 1356 | AAAYDTAGWG | 1630 | CnaA |
| | | | | | ADGMDY | | |
| NBX21001 | GSIFSIKDM | 1083 | ITTGGTT | 1357 | GVLLNYRGPSSA | 1631 | NetB |
| | | | | | SYH | | |
| NBX21002 | RSIFSINVM | 1084 | ITRGGSTY | 1358 | NAVPARDR | 1632 | NetB |
| NBX21003 | GFTFSRAAM | 1085 | IDSDGGTT | 1359 | SLFRGYSAYDLR | 1633 | NetB |
| | | | | | S | | |
| NBX21004 | RSIVSDNVM | 1086 | ITRGGSTY | 1360 | NTVPARDR | 1634 | NetB |
| NBX21005 | GRTFSRYGM | 1087 | ISWSGDST | 1361 | AASYNPGTIATI | 1635 | NetB |
| | | | | | RREYEYDY | | |
| NBX21006 | GRTYSSYAM | 1088 | ISWSGGST | 1362 | AADRRTHVSDR | 1636 | NetB |
| | | | | | LGEYDY | | |
| NBX21007 | GRTFSSYAM | 1089 | ISWSDEDT | 1363 | AADRSYTVMVR | 1637 | NetB |
| | | | | | QMRGMDY | | |
| NBX21008 | RSIVSINVM | 1090 | ITRGGSTY | 1364 | NTVPARDR | 1638 | NetB |
| NBX21009 | RSIFSINVW | 1091 | ITRGGSTY | 1365 | NTVPARDH | 1639 | NetB |
| NBX21010 | GRTFSRYGM | 1092 | ISWSGDST | 1366 | AASYNPGNIATI | 1640 | NetB |
| | | | | | RREYEYDY | | |
| NBX21011 | GRTFSRYGM | 1093 | ISWSGGST | 1367 | AASYNPGNIATI | 1641 | NetB |
| | | | | | SREYEYDY | | |
| NBX21012 | GRTFSRYGM | 1094 | ISWSGGST | 1368 | AASYNPGTIATI | 1642 | NetB |
| | | | | | RREYEYDY | | |
| NBX21013 | GRTFSSYAM | 1095 | IRSGNST | 1369 | AADVVTHLATR | 1643 | NetB |
| | | | | | FYEYDY | | |
| NBX21014 | GRTFSSYAM | 1096 | ISWSGGST | 1370 | AADRLTHYSDY | 1644 | NetB |
| | | | | | PADFGS | | |
| NBX21015 | GRTFSSYAM | 1097 | ISWSGSNT | 1371 | AADRLTHYSDY | 1645 | NetB |
| | | | | | PADFDS | | |
| NBX21016 | RSIFSANVM | 1098 | ITRGSSTY | 1372 | NLVPARDR | 1646 | NetB |
| NBX21023 | GSIFSIRDM | 1099 | ISSGGST | 1373 | SVLTNPGWNRP | 1647 | NetB |
| | | | | | LAYF | | |
| NBX21024 | GPTFSSYAMYA | 1100 | VSLTDGSK | 1374 | AGDLDSDVGYE | 1648 | NetB |
| | M | | | | H | | |
| NBX21025 | GRTFSSYAM | 1101 | ISWSGSNT | 1375 | AADRLTHYSDY | 1649 | NetB |
| | | | | | PADFGS | | |
| NBX21026 | GRTFSRYGM | 1102 | ISWSGGST | 1376 | AASYNPGNIATI | 1650 | NetB |
| | | | | | RREYEYDY | | |
| NBX21027 | RSIFSINVM | 1103 | ITRGGSTY | 1377 | NTVPARDR | 1651 | NetB |
| NBX21028 | GRAFSTYTM | 1104 | ISWTGGST | 1378 | AEKARTAVDVR | 1652 | NetB |
| | | | | | VTSGYDY | | |
| NBX21029 | GRIFSINVM | 1105 | ITRGGSTY | 1379 | NTVPARDR | 1653 | NetB |
| NBX21030 | GITFSSYAM | 1106 | ISTSGGST | 1380 | TARWDYPNTYE | 1654 | NetB |
| | | | | | YDY | | |
| NBX21031 | GGIFSFNVM | 1107 | ITRGGSTY | 1381 | NTVPARDR | 1655 | NetB |
| NBX21032 | GHTFSSYIM | 1108 | IRWSSGTT | 1382 | AADAGRDSIYD | 1656 | NetB |
| | | | | | Y | | |
| NBX21033 | GRTFSSYAM | 1109 | IRSGDST | 1383 | AADVVTHIATRF | 1657 | NetB |
| | | | | | YEYDY | | |
| NBX21034 | GRTFSSYAM | 1110 | ISWSGAST | 1384 | AADRLTHYSDY | 1658 | NetB |
| | | | | | PRDFGS | | |
| NBX21035 | RSIFRENVM | 1111 | ITRGSSTY | 1385 | NLVPARDP | 1659 | NetB |
| NBX21038 | GRTFSMYTM | 1112 | ISGSAGST | 1386 | ASEATHGTNRQ | 1660 | NetB |
| | | | | | LDYDY | | |
| NBX21039 | GGTFSRYGM | 1113 | ISWSGDST | 1387 | ASYNPGNIATIR | 1661 | NetB |
| | | | | | REYEYDY | | |
| NBX21040 | GGTFSRYGM | 1114 | ISWSGDST | 1388 | AASYNPGTIATI | 1662 | NetB |
| | | | | | RREYEYDY | | |
| NBX21041 | RGTFSRYGM | 1115 | ISWSGDST | 1389 | AASYNPGTIPTI | 1663 | NetB |
| | | | | | RREYEYDY | | |
| NBX21042 | GRTFSRLGM | 1116 | ISWSGDMT | 1390 | GASYNPGTIATI | 1664 | NetB |
| | | | | | RREYEYDY | | |
| NBX21043 | GGTFSRYGM | 1117 | ISWSGDSK | 1391 | AASYNPGNIATI | 1665 | NetB |
| | | | | | RREYEYDY | | |
| NBX21044 | GGTFSRYGM | 1118 | ISWSGDST | 1392 | AASYNPGNIATI | 1666 | NetB |
| | | | | | RREYEYDY | | |
| NBX21045 | GSSGSIKDM | 1119 | ISTGGTT | 1393 | SVLLNIRGPSSA | 1667 | NetB |
| | | | | | SYH | | |
| NBX21046 | GSSGSIKDM | 1120 | ITTGGTT | 1394 | NVLLNYRGPSSA | 1668 | NetB |
| | | | | | SYH | | |
| NBX21047 | GRSFSSYTM | 1121 | VTWNGEVP | 1395 | AAGNPGRGYDY | 1669 | NetB |
| NBX21048 | GGTFSRYGM | 1122 | ISWSGGST | 1396 | AASYNPGNIATI | 1670 | NetB |
| | | | | | RREYEYDY | | |
| NBX21049 | GRTFSNYAM | 1123 | ISRSGGST | 1397 | AADSLRTHVSD | 1671 | NetB |
| | | | | | RSYEYDS | | |
| NBX21050 | GGTFSRYGM | 1124 | ISWSGDNT | 1398 | ASYNPGNIATIR | 1672 | NetB |
| | | | | | REYEYDY | | |
| NBX21051 | GRTFSSYAM | 1125 | ISRSGAST | 1399 | AADSLRTHVSH | 1673 | NetB |
| | | | | | VSYEYDS | | |
| NBX21052 | GRTFSSYAM | 1126 | IARSGSST | 1400 | AADSLRTHVSD | 1674 | NetB |
| | | | | | RSDEYDY | | |
| NBX21053 | GRTFSRYGM | 1127 | ISWSGDST | 1401 | GASYNPGNIATI | 1675 | NetB |
| | | | | | RREYEYDY | | |
| NBX21054 | GRTFSHYAM | 1128 | IRTSAGIT | 1402 | AIDDDYAYYPPS | 1676 | NetB |
| | | | | | LLDRYDY | | |
| NBX21055 | GRTASSAAM | 1129 | ISWSGGST | 1403 | AADRRTHVSDR | 1677 | NetB |
| | | | | | LGEYDY | | |
| NBX21056 | GRTFSTYAM | 1130 | ISRSGAST | 1404 | AADSLRTHVSH | 1678 | NetB |
| | | | | | VSYEYDS | | |
| NBX21057 | GRTLSRYGM | 1131 | ISWSGDRT | 1405 | ASYNPGNIATIR | 1679 | NetB |
| | | | | | REYEYDY | | |
| NBX21068 | GGTFSRYGL | 1132 | ISWSGDRT | 1406 | GASYNPGNIATI | 1680 | NetB |
| | | | | | RREYEYDY | | |
| NBX21069 | EGTFSRYGM | 1133 | ISWSGDST | 1407 | AASYNPGNIATI | 1681 | NetB |
| | | | | | RREYEYDY | | |
| NBX21070 | GRTFSMYTM | 1134 | ISGSAGST | 1408 | SSTATHGTNRQ | 1682 | NetB |
| | | | | | LDYDY | | |
| NBX21071 | GRTFSTGAM | 1135 | ISWSGGST | 1409 | AASLLTHVSDRA | 1683 | NetB |
| | | | | | LEYDY | | |
| NBX21072 | EGTFSRYGM | 1136 | ISWSGDRT | 1410 | AASYNPGNIATI | 1684 | NetB |
| | | | | | RREYEYDY | | |
| NBX21073 | GSIFSINVM | 1137 | ATSGGQT | 1411 | NGRSASYYPTY | 1685 | NetB |
| | | | | | DY | | |
| NBX21074 | GRTFSHYAM | 1138 | IRGNAGIT | 1412 | AIDLDYAYYPPS | 1686 | NetB |
| | | | | | LVDRYDY | | |
| NBX21075 | GSSGSMKDM | 1139 | ITTGGTT | 1413 | NVLLNYRGPSSA | 1687 | NetB |
| | | | | | SYH | | |
| NBX21076 | GRTFSHYAM | 1140 | ISRSGGST | 1414 | AADSLRTHVSD | 1688 | NetB |
| | | | | | RSYEYDS | | |
| NBX21077 | GRTFSTYAM | 1141 | ISRSGGST | 1415 | AADSLRTHVSD | 1689 | NetB |
| | | | | | RSYEYDY | | |
| NBX21078 | GSIFSSDDM | 1142 | ITSGGMT | 1416 | NAFRSKVVDGII | 1690 | NetB |
| | | | | | LKRRDYDY | | |
| NBX21079 | GRTFSSYTM | 1143 | ISGSAGST | 1417 | ASEATHGTNRQ | 1691 | NetB |
| | | | | | LDYDY | | |
| NBX21080 | GSIFSDDIW | 1144 | ITRGSRPY | 1418 | NAVPARDR | 1692 | NetB |
| NBX21081 | GSIGSINVM | 1145 | VTSGGMT | 1419 | NGRSASYYPTY | 1693 | NetB |
| | | | | | NY | | |
| NBX21082 | GDTLSRYGM | 1146 | ITWSGSST | 1420 | AGPNLGPITIMR | 1694 | NetB |
| | | | | | DYEYDY | | |
| NBX21083 | GSIFSINVM | 1147 | ITSGGKS | 1421 | GRSASYYPTYDY | 1695 | NetB |
| NBX21084 | GSIGSINVM | 1148 | ATSGGMT | 1422 | NGRSASYYPTY | 1696 | NetB |
| | | | | | NY | | |
| NBX21085 | GGTFSRYGM | 1149 | ISWSGDRT | 1423 | AASYNPGNIATI | 1697 | NetB |
| | | | | | RREYEYDY | | |
| NBX21086 | GSTFSINRV | 1150 | IRSNGIT | 1424 | NDPLAPFSSDAS | 1698 | NetB |
| NBX22019 | GRTFSSYAM | 1151 | ISWSGGIT | 1425 | AADARSDSGSY | 1699 | CnaA |
| | | | | | YYPADFGS | | |
| NBX22020 | GGTFSSYPM | 1152 | ISWSGGTT | 1426 | AAQSGPYGSSS | 1700 | CnaA |
| | | | | | SWEADFGS | | |
| NBX22021 | GRTLSSYIM | 1153 | IAWSGSVT | 1427 | AGDLHGIGYEYK | 1701 | CnaA |
| | | | | | Y | | |
| NBX22022 | GFSLDDYAI | 1154 | ISRTSDGST | 1428 | AAGFVCSGYGG | 1702 | CnaA |
| | | | | | GIRGYEYDY | | |
| NBX22023 | NIFSINLM | 1155 | ITSGGNT | 1429 | HCDWCS | 1703 | CnaA |
| NBX22024 | GGTFSSYPM | 1156 | ISWSGGGT | 1430 | AADSPVGPSGL | 1704 | CnaA |
| | | | | | TTHWGY | | |
| NBX22025 | GRTFSSYVM | 1157 | ISWSGGVT | 1431 | AADARSDSGRY | 1705 | CnaA |
| | | | | | YYPADFGS | | |
| NBX22029 | GRTFSNYVM | 1158 | ISWSGGTT | 1432 | AAEHGAGSRW | 1706 | CnaA |
| | | | | | YFPEDFGS | | |
| NBX22030 | NIFSINLM | 1159 | ITSSGNT | 1433 | HCDWCS | 1707 | CnaA |
| NBX22031 | GGTFSSYPM | 1160 | ISWSGGVT | 1434 | AAQSGPYGSSS | 1708 | CnaA |
| | | | | | SWEADFDS | | |
| NBX22032 | GRTFSSYVM | 1161 | ISWSGGVT | 1435 | AAEVGYGSRWY | 1709 | CnaA |
| | | | | | YETDFGS | | |
| NBX22033 | GRTLSSYAM | 1162 | ISWSGGVT | 1436 | AALPDGRSWY | 1710 | CnaA |
| | | | | | QADY | | |
| NBX22034 | GRTFSSYAM | 1163 | ISWSGGVT | 1437 | AAENGYGSSWY | 1711 | CnaA |
| | | | | | FEADFGS | | |
| NBX22035 | GRTFSGSGM | 1164 | ISWTGSIT | 1438 | ARATMGPTSRS | 1712 | CnaA |
| | | | | | DAYDY | | |
| NBX22036 | NIFSINVM | 1165 | ITSGGNT | 1439 | HCDWCS | 1713 | CnaA |
| NBX22037 | NIFSINVM | 1166 | ITSGGDT | 1440 | HCDWCS | 1714 | CnaA |
| NBX22038 | NIFSINLM | 1167 | ITSGGHT | 1441 | HCDWCS | 1715 | CnaA |
| NBX22039 | GGTFSNYAM | 1168 | ISWSGGVA | 1442 | AAEVGYGTSWY | 1716 | CnaA |
| | | | | | YEADFGS | | |
| NBX22040 | GRTFSGSGM | 1169 | ISWTGSIT | 1443 | ARSTVGPTSRSD | 1717 | CnaA |
| | | | | | AYDY | | |
| NBX22041 | GRTLSDYIM | 1170 | IAWSGSTT | 1444 | AGDLHGIGYEYK | 1718 | CnaA |
| | | | | | Y | | |
| NBX22042 | GRTFSGSPM | 1171 | ISWTGSIT | 1445 | ARSTVGPTSRSD | 1719 | CnaA |
| | | | | | AYDY | | |
| NBX22043 | NVLSINLM | 1172 | ITSGGDT | 1446 | HCDWCS | 1720 | CnaA |
| NBX22044 | GRAFSRYTM | 1173 | IDWSGGIDW | 1447 | AAIDYPGTRPAV | 1721 | CnaA |
| | | | SGGRST | | SANEYDY | | |
| NBX22045 | GRTLSNYIM | 1174 | IAWSGSVT | 1448 | AGDLHGIGYEY | 1722 | CnaA |
| | | | | | AY | | |
| NBX22046 | GRTLSSYIM | 1175 | IGWSGSTT | 1449 | AGDLQGIGYEY | 1723 | CnaA |
| | | | | | HN | | |
| NBX22055 | GGTFSNYVM | 1176 | ISWSGGST | 1450 | AAETGGGSRW | 1724 | CnaA |
| | | | | | YRTADFGS | | |
| NBX22056 | GRTFSTYGM | 1177 | ISASGGGT | 1451 | AADRTTWGRQ | 1725 | CnaA |
| | | | | | TPYDY | | |
| NBX22057 | GRTFSTYAM | 1178 | IRWNTGST | 1452 | ALKRYGGGTSTY | 1726 | CnaA |
| | | | | | DQGYDT | | |
| NBX22058 | GRTFSSGAM | 1179 | ISRSGSST | 1453 | AASLGRAYETSA | 1727 | CnaA |
| | | | | | SGAYDY | | |
| NBX22059 | GRTFRSYGV | 1180 | ISSSGGGT | 1454 | AGAVRDWGRD | 1728 | CnaA |
| | | | | | AIYDS | | |
| NBX22060 | GFTFSRYAM | 1181 | ITSAGGST | 1455 | NAEMYSNADV | 1729 | CnaA |
| | | | | | MFNGY | | |
| NBX22061 | GRTISNYTM | 1182 | INPSGGAT | 1456 | AAGSSHGRRW | 1730 | CnaA |
| | | | | | YIDGGRYDY | | |
| NBX22062 | GFTFSNYAM | 1183 | ITSTGGST | 1457 | NAEIYTHYDVM | 1731 | CnaA |
| | | | | | FNGY | | |
| NBX22063 | GRTFSTYGM | 1184 | ISASGGGT | 1458 | AAARTGWGRQ | 1732 | CnaA |
| | | | | | TTHDY | | |
| NBX22064 | GFTFSSYSM | 1185 | SSGGGDIT | 1459 | MRVSGDY | 1733 | CnaA |
| NBX22065 | GRTFSSGAM | 1186 | ISRSGSGT | 1460 | AASLGRAYETSA | 1734 | CnaA |
| | | | | | SGAYDY | | |
| NBX22066 | GRTFRSYGV | 1187 | ISWSGGGT | 1461 | AGAVGDWGRD | 1735 | CnaA |
| | | | | | AIYDY | | |
| NBX22067 | GRTFSSYGM | 1188 | ISTSGGGT | 1462 | AASSRGWGRG | 1736 | CnaA |
| | | | | | VSYDY | | |
| NBX22068 | GGTFSNYVM | 1189 | ISWSGGNA | 1463 | AAETGYGNRW | 1737 | CnaA |
| | | | | | YAPADFGS | | |
| NBX22069 | GHTFSTYGM | 1190 | ISASGGGT | 1464 | AAARTGWGRQ | 1738 | CnaA |
| | | | | | TTHDY | | |
| NBX22070 | GRTFSSYGM | 1191 | ISRSGGGT | 1465 | AASSTGWGRED | 1739 | CnaA |
| | | | | | SYDY | | |
| NBX22083 | GRTFSSYVM | 1192 | ISWSGGVT | 1466 | AASDSENSGSYY | 1740 | CnaA |
| | | | | | RNQDFGY | | |
| NBX22084 | GRTFSNYAM | 1193 | ISWSGGIT | 1467 | AADRGTDSGSY | 1741 | CnaA |
| | | | | | YYTEDFGS | | |
| NBX22085 | GGTFSSYVM | 1194 | ISWSGGVT | 1468 | AADRTAVVPAQ | 1742 | CnaA |
| | | | | | IRSYNY | | |
| NBX22086 | GRTFSNYIM | 1195 | ISWSGGVT | 1469 | AAEVGYGSSWY | 1743 | CnaA |
| | | | | | YEADFGS | | |
| NBX22087 | GRTFSSYAM | 1196 | ISWSGGIT | 1470 | AADLEGAGNFR | 1744 | CnaA |
| | | | | | EFGS | | |
| NBX22088 | GRTFSSYVM | 1197 | ISWSGGVT | 1471 | AADRTAIVPAQI | 1745 | CnaA |
| | | | | | RSYDY | | |
| NBX22089 | GRTGGSFDM | 1198 | ITWSGGST | 1472 | AAGGFGALGVE | 1746 | CnaA |
| | | | | | HRYRY | | |
| NBX22090 | GNIFSISLM | 1199 | ITSGGNT | 1473 | HCDWCS | 1747 | CnaA |
| NBX22093 | GRTFKIYGV | 1200 | ISSSGGGT | 1474 | AVGGWGRDDI | 1748 | CnaA |
| | | | | | YDY | | |
| NBX22094 | ARTFSEYIM | 1201 | ISSSGATT | 1475 | AANRFLSAARY | 1749 | CnaA |
| | | | | | DRQRYDY | | |
| NBX22095 | GHTFSTYGM | 1202 | ISASGGGT | 1476 | AAARASWGRQ | 1750 | CnaA |
| | | | | | TTHDY | | |
| NBX22096 | GLTLNNYAL | 1203 | ISAGGDII | 1477 | RVSGDY | 1751 | CnaA |
| NBX22097 | GRTFSTYGM | 1204 | ISASGGGT | 1478 | AAARTGWGRQ | 1752 | CnaA |
| | | | | | TTYDY | | |
| NBX22098 | GGSLSNYIV | 1205 | ISWSGEVT | 1479 | AGEHNGRSWY | 1753 | CnaA |
| | | | | | DVGNYAY | | |
| NBX22099 | GRTFSSGAM | 1206 | ISRSGSRT | 1480 | AASLGRGYENS | 1754 | CnaA |
| | | | | | DSGAYDY | | |
| NBX22100 | GFNLNYYAI | 1207 | ISSSDGST | 1481 | AARAGGEFYYC | 1755 | CnaA |
| | | | | | SGDSSADY | | |
| NBX22101 | TFSSGAM | 1208 | ISRSSSRT | 1482 | AASLSRGYETSD | 1756 | CnaA |
| | | | | | SGAYDY | | |
| NBX22102 | GRTFRMYGV | 1209 | ISSSGAGT | 1483 | AGADRDWGRD | 1757 | CnaA |
| | | | | | AIYDY | | |
| NBX22103 | GFTWNNYGM | 1210 | INSGGDII | 1484 | NRISGDY | 1758 | CnaA |
| NBX22104 | TFSFGAM | 1211 | ISRSVSRT | 1485 | AASQGRGYETS | 1759 | CnaA |
| | | | | | ATGAYDY | | |
| NBX22105 | GRTFSDYIM | 1212 | ISWSGGVT | 1486 | AADGRSDSGGS | 1760 | CnaA |
| | | | | | YYPADFGS | | |
| NBX22106 | GFTFDDYAI | 1213 | IERSGSST | 1487 | AGRVCSGYGGR | 1761 | CnaA |
| | | | | | IQGYEYDY | | |
| NBX22107 | TFSFGAM | 1214 | ISRSVSRT | 1488 | AASQGRGYETS | 1762 | CnaA |
| | | | | | DTGAYDY | | |
| NBX22108 | GRTFTMYGV | 1215 | ISSSGGGT | 1489 | AVGGWGRDDI | 1763 | CnaA |
| | | | | | YEY | | |
| NBX22109 | GRTFSSGAM | 1216 | ISRSGSTT | 1490 | AASLGRGYENS | 1764 | CnaA |
| | | | | | DSGAYDY | | |
| NBX22110 | TFSSGAM | 1217 | ISRSSSRT | 1491 | AASLSRAYETSD | 1765 | CnaA |
| | | | | | SGAYDY | | |
| NBX22111 | GRTFSTYGM | 1218 | ISASGGGT | 1492 | AAARTSWGRQ | 1766 | CnaA |
| | | | | | TTHDY | | |
| NBX22112 | GRTFSDYVM | 1219 | ISWSGGVT | 1493 | AADARSDSGR | 1767 | CnaA |
| | | | | | WYYPADFGS | | |
| NBX22119 | GRTFSSYAM | 1220 | ISWSGGIT | 1494 | AADTGADSGSY | 1768 | CnaA |
| | | | | | YYPADFGS | | |
| NBX22120 | GGTFSSYIM | 1221 | ISWSGGVT | 1495 | AADARSDSGRY | 1769 | CnaA |
| | | | | | YYPADFGS | | |
| NBX22121 | GRTLSNYAM | 1222 | ISGSGSNT | 1496 | AAREGLALRYAT | 1770 | CnaA |
| | | | | | YDY | | |
| NBX22122 | NIFSIALM | 1223 | ITSGGNT | 1497 | HCDWCS | 1771 | CnaA |
| NBX22123 | GRTFSTYGM | 1224 | ISASGGGT | 1498 | AVARTGWGRE | 1772 | CnaA |
| | | | | | ATHDY | | |
| NBX22124 | GRTFSDYEM | 1225 | ISGSGGTT | 1499 | AARVPRVGRFD | 1773 | CnaA |
| | | | | | ENEYEY | | |
| NBX22125 | GDTFSAYGM | 1226 | ISSGGGGT | 1500 | ARAVRSWGRA | 1774 | CnaA |
| | | | | | AEHDY | | |
| NBX22126 | RTASTSTM | 1227 | WSG | 1501 | AASPRIWYRDT | 1775 | CnaA |
| | | | | | NYKRATWYDY | | |
| NBX22127 | GRTFSDYAM | 1228 | ISWSGGVT | 1502 | AADARSDHASY | 1776 | CnaA |
| | | | | | YYPADFGF | | |
| NBX22128 | GRTFSGYIM | 1229 | ISSSGATT | 1503 | AADQFDSTARY | 1777 | CnaA |
| | | | | | DRRQYEY | | |
| NBX25006 | GSTLSTYAF | 1230 | ISRGGKT | 1504 | DTVGYYPEIR | 1778 | NetB |
| NBX25007 | GSIFGYAM | 1231 | ISRGGTP | 1505 | RCLGFDY | 1779 | NetB |
| NBX25008 | GSIFGIKAM | 1232 | ITEGGTT | 1506 | NSLWSLLEQYP | 1780 | NetB |
| | | | | | RYF | | |
| NBX25009 | GFTPVYYAI | 1233 | ISSVDGKT | 1507 | AAEGPPYDPGQ | 1781 | NetB |
| | | | | | LCPYNDMDY | | |
| NBX25010 | LNSGSIAGM | 1234 | ITRGGSS | 1508 | AYRKDDFGFEV | 1782 | NetB |
| | | | | | LY | | |
| NBX25011 | GSTFSNYAM | 1235 | ISRGGVA | 1509 | DTVGYYSEVR | 1783 | NetB |
| NBX25012 | GSTLSTYAF | 1236 | ISRGGRT | 1510 | DTVGYYPEIR | 1784 | NetB |
| NBX25013 | GITFSAYAM | 1237 | ISRAGIT | 1511 | RTLGFAY | 1785 | NetB |
| NBX25014 | GITFSAYAM | 1238 | ISRAGIT | 1512 | RTLGFPY | 1786 | NetB |
| NBX25015 | GSIAPYAM | 1239 | ISRGSLP | 1513 | TLGFDY | 1787 | NetB |
| NBX25016 | GSTFSSYVM | 1240 | ISSGGST | 1514 | NLRDRFGHGY | 1788 | NetB |
| NBX25017 | GTTLSNYAM | 1241 | ISRGGTP | 1515 | KILGFDV | 1789 | NetB |
| NBX25018 | LNSGSIAGM | 1242 | ITRGGSS | 1516 | FAYRKDDFGFE | 1790 | NetB |
| | | | | | VLY | | |
| NBX0572 | RPTISGYAM | 1796 | ISGSGAST | 1801 | AVYSAPDPTFD | 1806 | CnaA |
| | | | | | HYHMYSANYD | | |
| | | | | | N | | |
| NBX0573 | PTISSYAV | 1797 | SWSASST | 1802 | ASMRASYCAGY | 1807 | CnaA |
| | | | | | RCHORAQTYDY | | |
| NBX0575 | RRTLSSYVM | 1798 | ISKDGRST | 1803 | ASDYNGGGIPSL | 1808 | CnaA |
| | | | | | RLDYNY | | |
| NBX0576 | GSTNTFNKM | 1799 | MSRGDP | 1804 | RGRIGERVY | 1809 | CnaA |
| NBX0577 | GRAIGELSM | 1800 | AIWSGGT | 1805 | NVGANY | 1810 | CnaA |

### 3. Antibodies Recombinantly Expressed

[0057] In another aspect, the present invention provides a method for producing V_{H}H in a suitable producing organism. Suitable producing organisms include, without limitation, bacteria, yeast, and algae. In certain embodiments, the producing bacterium is Escherichia coli. In certain embodiments, the producing bacterium is a member of the Bacillus genus. In certain embodiments, the producing bacterium is a probiotic. In certain embodiments, the yeast is Pichia pastoris. In certain embodiments, the yeast is Saccharomyces cerevisiae. In certain embodiments, the alga is a member of the Chlamydomonas or Phaeodactylum genera.

### 3. Antibodies Added to Feed

[0058] In yet another aspect, the present invention provides a polypeptide or pluralities thereof comprising a V_{H}H or V_{H}Hs that bind disease-causing agents and are administered to host animals via any suitable route as part of a feed product. In certain embodiments, the animal is selected from the list of host animals described, with that list being representative but not limiting. In certain embodiments, the route of administration to a recipient animal can be, but is not limited to: introduction to the alimentary canal orally or rectally, provided to the exterior surface (for example, as a spray or submersion), provided to the medium in which the animal dwells (including air based media), provided by injection, provided intravenously, provided via the respiratory system, provided via diffusion, provided via absorption by the endothelium or epithelium, or provided via a secondary organism such as a yeast, bacterium, algae, bacteriophages, plants and insects. In certain embodiments, the host is from the superorder Galloanserae. In certain embodiments, the host is a poultry animal. In certain embodiments, the poultry animal is a chicken, turkey, duck, quail, pigeon, squab or goose. In certain embodiments, the poultry animal is a chicken.

### B. Feed Product

[0059] In a further aspect, the present invention provides a polypeptide or pluralities thereof comprising a V_{H}H or V_{H}Hs that bind disease-causing agents and are administered to host animals in the form of a product. The form of the product is not limited, so long as it retains binding to the disease-causing agent in the desired form. In certain embodiments, the product is feed, pellet, nutritional supplement, premix, therapeutic, medicine, or feed additive, but is not limited to these forms.

### 1. Feeding Dosage

[0060] In a further aspect, the present invention provides a polypeptide or pluralities thereof comprising a V_{H}H or V_{H}Hs that bind disease-causing agents and are administered to host animals as part of a product at any suitable dosage regime. In practice, the suitable dosage is the dosage at which the product offers any degree of protection against a disease-causing agent, and depends on the delivery method, delivery schedule, the environment of the recipient animal, the size of the recipient animal, the age of the recipient animal and the health condition of the recipient animal among other factors. In certain embodiments, V_{H}Hs are administered to recipient animals at a concentration in excess of 1 mg/kg of body weight. In certain embodiments, V_{H}Hs are administered to recipient animals at a concentration in excess of 5 mg/kg of body weight. In certain embodiments, V_{H}Hs are administered to recipient animals at a concentration in excess of 10 mg/kg of body weight. In certain embodiments, V_{H}Hs are administered to recipient animals at a concentration in excess of 50 mg/kg of body weight. In certain embodiments, V_{H}Hs are administered to recipient animals at a concentration in excess of 100 mg/kg of body weight. In certain embodiments, V_{H}Hs are administered to recipient animals at a concentration less than 1 mg/kg of body weight. In certain embodiments, V_{H}Hs are administered to recipient animals at a concentration less than 500 mg/kg of body weight. In certain embodiments, V_{H}Hs are administered to recipient animals at a concentration less than 100 mg/kg of body weight. In certain embodiments, V_{H}Hs are administered to recipient animal at a concentration less than 50 mg/kg of body weight. In certain embodiments, V_{H}Hs are administered to recipient animals at a concentration less than 10 mg/kg of body weight.

### 2. Feeding Frequency

[0061] In a further aspect, the present invention provides a polypeptide or pluralities thereof comprising a V_{H}H or V_{H}Hs that bind disease-causing agents and are administered to host animals as part of a product at any suitable dosage frequency. In practice, the suitable dosage frequency is that at which the product offers any protection against a disease-causing agent, and depends on the delivery method, delivery schedule, the environment of the recipient animal, the size of the recipient animal, the age of the recipient animal and the health condition of the recipient animal, among other factors. In certain embodiments, the dosage frequency can be but is not limited to: constantly, at consistent specified frequencies under an hour, hourly, at specified frequencies throughout a 24-hour cycle, daily, at specified frequencies throughout a week, weekly, at specified frequencies throughout a month, monthly, at specified frequencies throughout a year, annually, and at any other specified frequency greater than 1 year.

### 3. Feed Additives

[0062] In a further aspect, the present invention provides a polypeptide or pluralities thereof comprising a V_{H}H or V_{H}Hs that bind disease-causing agents and are administered to host animals as part of a product that also comprises other additives or coatings. In practice, the most suitable coating or additive depends on the method of delivery, the recipient animal, the environment of the recipient, the dietary requirements of the recipient animal, the frequency of delivery, the age of the recipient animal, the size of the recipient animal, the health condition of the recipient animal In certain embodiments, these additives and coatings can include but are not limited to the following list and mixtures thereof: a vitamin, an antibiotic, a hormone, an antimicrobial peptide, a steroid, a probiotic, a probiotic, a bacteriophage, chitin, chitosan, B-1,3-glucan, vegetable extracts, peptone, shrimp meal, krill, algae, B-cyclodextran, alginate, gum, tragacanth, pectin, gelatin, an additive spray, a toxin binder, a short chain fatty acid, a medium chain fatty acid, yeast, a yeast extract, sugar, a digestive enzyme, a digestive compound, an essential mineral, an essential salt, or fibre.

### C. Non-Feed Uses

[0063] In a further aspect, the present invention provides a polypeptide or pluralities thereof comprising a V_{H}H or V_{H}Hs that bind disease-causing agents, and can be used in a non-feed use, such as but not limited to: a diagnostic kit, an enzyme-linked immunosorbent assay (ELISA), a western blot assay, an immunofluorescence assay, or a fluorescence resonance energy transfer (FRET) assay, in its current form and/or as a polypeptide conjugated to another molecule. In certain embodiments, the conjugated molecule is can be but is not limited to: a fluorophore, a chemiluminescent substrate, an antimicrobial peptide, a nucleic acid, or a lipid.

### D. Antigens

[0064] In a further aspect, the present invention provides a polypeptide or pluralities thereof comprising a V_{H}H or V_{H}Hs that bind disease-causing agents, including toxins, produced by a species of Clostridium. In certain embodiments, the species does not belong to the Clostridium genus but is capable of harbouring disease-causing agents shared by Clostridium species. In certain embodiments, the Clostridium species refers to both current and reclassified organisms. In certain embodiments, the Clostridium species is Clostridium perfringens.

[0065] In certain embodiments, the V_{H}H or plurality thereof is capable of binding to one or more disease-causing agents, originating from the same or different species. In certain embodiments, the disease-causing agent is a polypeptide with 80% or greater amino acid sequence identity to NetB (SEQ ID NO: 207). In certain embodiments, the disease-causing agent is a polypeptide with 80% or greater amino acid sequence identity to Cpa (SEQ ID NO: 208). In certain embodiments, the disease-causing agent is a polypeptide with 80% or greater amino acid sequence identity to Cpb2 (SEQ ID NO: 209). In certain embodiments, the disease-causing agent is a polypeptide with 80% or greater amino acid sequence identity to CnaA (SEQ ID NO: 210). In certain embodiments, the disease-causing agent is a polypeptide with 80% or greater amino acid sequence identity to the collagen-binding domain of CnaA (SEQ ID NO: 211). In certain embodiments, the disease-causing agent is an exposed peptide, protein, protein complex, nucleic acid, lipid, or combination thereof, that is associated to the surface of the Clostridium bacterium. In certain embodiments, the disease-causing agent is a pilus, fimbria, flagellum, secretion system or porin. In certain embodiments, the disease-causing agent is the Clostridium bacterium.

[0066] In certain embodiments, the disease-causing agent or a derivative thereof can be provided in excess and outcompete the activity of the pathogen expressed disease-causing agent. In certain embodiments, a polypeptide with 80% or greater amino acid sequence identity to CnaA (SEQ ID NO: 210) or the collagen-binding domain of CnaA (SEQ ID NO: 211) can be provided in excess to outcompete the activity of CnaA expressed by the Clostridium perfringens bacterium.

1. Antigen Sequences
a. NetB
>ABW71134.1 necrotic enteritis toxin B
precursor [Clostridium perfringens]
(SEQ ID NO: 207)
MKRLKIISITLVLTSVISTSLFSTQTQVFASELNDINKIELKNLS
GEIIKENGKEAIKYTSSDTASHKGWKATLSGTFIEDPHSDKKTAL
LNLEGFIPSDKQIFGSKYYGKMKWPETYRINVKSADVNNNIKIAN
SIPKNTIDKKDVSNSIGYSIGGNISVEGKTAGAGINASYNVQNTI
SYEQPDFRTIQRKDDANLASWDIKFVETKDGYNIDSYHAIYGNQL
FMKSRLYNNGDKNFTDDRDLSTLISGGFSPNMALALTAPKNAKES
VIIVEYQRFDNDYILNWETTQWRGTNKLSSTSEYNEFMFKINWQD
HKIEYYL
b. Cpa
>WP_057230321.1 phospholipase
[Clostridium perfringens]
(SEQ ID NO: 208)
MKRKICKALICAALATSLWAGASTKVYAWDGKIDGTGTHAMIVTQ
GVSILENDLSKNEPESVRKNLEILKENMHELQLGSTYPDYDKNAY
DLYQDHFWDPDTDNNFSKDNSWYLAYSIPDTGESQIRKFSALARY
EWQRGNYKQATFYLGEAMHYFGDIDTPYHPANVTAVDSAGHVKFE
TFAEERKEQYKINTAGCKTNEDFYADILKNKDFNAWSKEYARGFA
KTGKSIYYSHASMSHSWDDWDYAAKVTLANSQKGTAGYIYRFLHD
VSEGNDPSVGKNVKELVAYISTSGEKDAGTDDYMYFGIKTKDGKT
QEWEMDNPGNDFMTGSKDTYTFKLKDENLKIDDIQNMWIRKRKYT
AFPDAYKPENIKIIANGKVVVDKDINEWISGNSTYNIK
c. Cpb2
>AEP94971.1 Beta2-toxin (plasmid)
[Clostridium perfringens]
(SEQ ID NO: 209)
MKKLIVKSTMMLLFSCLLCLGIQLPNTVKANEVNKYQSVMVQYLE
AFKNYDIDTIVDISKDSRTVTKEEYKNMLMEFKYDPNQKLKSYEI
TGSRKIDNGEIFSVKTEFLNGAIYNMEFTVSYIDNKLMVSNMNRI
SIVNEGKCIPTPSFRTQVCTWDDELSQYIGDAVSFTRSSKFQYSS
NTITLNFRQYATSGSRSLKVKYSVVDHWMWGDDIRASQWVYGENP
DYARQIKLYLGSGETFKNYRIKVENYTPASIKVFGEGYCY
d. CnaA
>ALJ54440.1 putative collagen adhesin
[Clostridium perfringens]
(SEQ ID NO: 210)
MKINKKIFSMLFMVIVLFTCISSNFSVSASSIQRGRDISNEVVTS
LVATPNSINDGGNVQVRLEFKENHQRNIQSGDTITVKWTNSGEVF
FEGYEKTIPLYIKDQNVGQAVIEKTGATLTFNDKIDKLDDVGGWA
TFTLQGRNITSGNHEHTGIAYIISGSKRADVNITKPESGTTSVFY
YKTGSMYTNDTNHVNWWLLVNPSKVYSEKNVYIQDEIQGGQTLEP
DSFEIVVTWYDGYVEKFKGKEAIREFHNKYPNSNISVSENKITVN
ISQEDSTQKFINIFYKTKITNPKQKEFVNNTKAWFKEYNKPAVNG
ESFNHSVQNINADAGVNGTVKGELKIIKTLKDKSIPIKDVQFKMR
RVDNTVIKDGKKELLLTTDDKGIANVKGLPVGKYEVKEISAPEWI
AFNPLIAPKLEFTISDQDTEGKLWAVENELKTISIPVEKVWVGQT
SERAEIKLFADGIEVDKVILNADNNWKHTFENKPEYNSETKQKIN
YSVSETTISGYESNITGDAKNGFIVTNTELPDLTIGKEVIGELGD
KTKVFNFELTLKQADGKPINGKFNYIGSVDDRYKKESIKPSDGEI
TFIEGKATITLSHGQEITIKDLPYGVTYKVMEKEANENGYLTTYN
GNNEVTTGELKQDTKVQVVNNKEFVPTTGISTTTEQGTMVGMVIF
SIGILMVMIVVLLQLNKGLKR
e. CnaA Collagen Binding Domain
(SEQ ID NO: 211)
GRDISNEVVTSLVATPNSINDGGNVQVRLEFKENHQRNIQSGDTI
TVKWTNSGEVFFEGYEKTIPLYIKDQNVGQAVIEKTGATLTFNDK
IDKLDDVGGWATFTLQGRNITSGNHEHTGIAYIISGSKRADVNIT
KPESGTTSVFYYKTGSMYTNDTNHVNWWLLVNPSKVYSEKNVYIQ
DEIQGGQTLEPDSFEIVVTWYDGYVEKFKGKEAIREFHNKYPNSN
ISVSENKITVNISQEDSTQKFINIFYKTKITNPKQKEFVNNTKAW
FKEYNKPAVNGESFNHSVQNINADAGVNGTVK

### Examples

[0067] The following illustrative examples are representative of the embodiments of the applications, systems and methods described herein and are not meant to be limiting in any way.

[0068] While preferred embodiments of the present invention are shown and described herein, it will be obvious to those skilled in the art that such embodiments are provided by way of example only. Numerous variations, changes, and substitutions will now occur to those skilled in the art without departing from the invention. It should be understood that various alternatives to the embodiments of the invention described herein may be employed in practicing the invention.

### 1. Production of Antigens

[0069] Recombinant antigens can be purified from an E. coli expression system. For example, an antigen can be expressed at 18° C. in E. coli BL21 (DE3) cells grown overnight in autoinducing media (Formedium). Cells are then lysed by sonication in buffer A (250 mM NaCl, 50 mM CaCl₂), 20 mM Imidazole and 10 mM HEPES, pH 7.4) with 12.5 μg/ml DNase I, and 1× Protease inhibitor cocktail (Bioshop). The lysate is cleared by centrifugation at 22000×g for 30 minutes at 4° C., applied to a 5 ml HisTrap HP column (GE Healthcare) pre-equilibrated with buffer A, washed with ten column volumes of buffer A and eluted with a gradient of 0% to 60% (vol/vol) buffer B (250 mM NaCl, 50 mM CaCl₂, 500 mM imidazole and 10 mM HEPES, pH 7.4). The protein is then dialyzed overnight in the presence of TEV against buffer C (250 mM NaCl, 10 mM HEPES, pH 7.4 and 5 mM β-mercaptoethanol) at 4° C. The dialyzed protein is applied to a HisTrap HP column (GE Biosciences) pre-equilibrated with buffer C. 6×His-tagged TEV and 6×His-tag are bound to the column and the antigen is collected in the flowthrough. The sample is dialyzed overnight against buffer D (5 mM NaCl and 10 mM Tris pH 8.8) and then applied to a 5 ml HiTrap Q HP column (GE Healthcare). The protein is eluted with a gradient of 0% to 50% (vol/vol) buffer E (1.0 M NaCl and 10 mM Tris pH 8.8). Lastly, the eluate is loaded onto a Superdex 75 Increase 10/300 GL gel filtration column (GE Healthcare) using buffer F (400 mM NaCl and 20 mM HEPES pH 7.4). The protein sample is then concentrated to 1 mg/mL using Amicon concentrators with appropriate molecular weight cut-off (MWCO; Millipore). The purified protein is stored at −80° C.

### 2. Production of NBXs and Panning

### Llama Immunisation

[0070] A single llama is immunized with purified disease-causing agents, such as the antigens listed, which may be accompanied by adjuvants. The llama immunization is performed using 100 μg of each antigen that are pooled and injected for a total of four injections. At the time of injection, the antigens are thawed, and the volume increased to 1 ml with PBS. The 1 ml antigen-PBS mixture is then mixed with 1 ml of Complete Freund's adjuvant (CFA) or Incomplete Freund's adjuvant (IFA) for a total of 2 ml. A total of 2 ml is immunized per injection. Whole llama blood and sera are then collected from the immunized animal on days 0, 28, 49, 70. Sera from days 28, 49 and 70 are then fractionated to separate V_{H}H from conventional antibodies. ELISA can be used to measure reactivity against target antigens in polyclonal and VHH-enriched fractions. Lymphocytes are collected from sera taken at days 28, 49, and 70.

### Panning

[0071] RNA isolated from purified llama lymphocytes is used to generate cDNA for cloning into phagemids. The resulting phagemids are used to transform E. coli TG-1 cells to generate a library of expressed V_{H}H genes. The phagemid library size can be ˜2.5×10⁷ total transformants and the estimated number of phagemid containing V_{H}H inserts can be estimated to be ˜100%. High affinity antibodies are then selected by panning against the antigens used for llama immunization. Two rounds of panning are performed and antigen-binding clones arising from round 2 are identified using phage ELISA. Antigen-binding clones are sequenced, grouped according to their CDR regions, and prioritized for soluble expression in E. coli and antibody purification.

[0072] FIG. 2 shows the phage ELISA results for antibodies of this disclosure. Black bars show binding to wells coated with the antigen specified in Tables 1 and 2 dissolved in phosphate-buffered saline (PBS). Grey bars are negative controls that show binding to wells coated with PBS only. In all cases binding to the antigen target is at least twice above binding to the PBS-coated wells. Data for NBX0301 to NBX0332 are shown in panel A. Data for NBX0333-NBX0360 are shown in panel B. Data for NBX0501-NBX0515 and NBX0517-NBX0528 are shown in panel C. Data for NBX0529-NBX0553 are shown in panel D. Data for NBX0561, NBX0801-NBX0812, NBX0847, and NBX0866-NBX0880 are shown in panel E. Data for NBX0881 and NBX0883-NBX08108 are shown in panel F. Data for NBX03161-NBX03177, NBX03179-NBX03181, NBX0570-NBX0573, and NBX0575-NBX0587 are shown in panel G. Data for NBX08116-NBX08129, NBX08138-NBX08145, and NBX08149-NBX08157 are shown in panel H. Data for NBX11001-NBX11026 are shown in panel I. Data for NBX11027-NBX11029 and NBX11032-NBX11054 are shown in panel J. Data for NBX21001-NBX21016, NBX21023-NBX21035, and NBX21038-NBX21042 are shown in panel K. Data for NBX21043-NBX21057 and NBX21068-NBX21086 are shown in panel L. Data for NBX22109-NBX22025, NBX22029-NBX22046, and NBX22055-NBX22060 are shown in panel M. Data for NBX22061-NBX22070, NBX22083-NBX22090, and NBX22093-NBX22105 are shown in panel N. Data for NBX22106-NBX22112, NBX22119-NBX22128, and NBX25006-NBX25018 are shown in panel O.

Purification of V_{H}Hs from E. coli

[0073] TEV protease-cleavable, 6×His-thioredoxin-NBX fusion proteins are expressed in the cytoplasm of E. coli grown in autoinducing media (Formedium) for 24 hours at 30° C. Bacteria are collected by centrifugation, resuspended in buffer A (10 mM HEPES, pH 7.5, 250 mM NaCl, 20 mM Imidazole) and lysed using sonication. Insoluble material is removed by centrifugation and the remaining soluble fraction is applied to a HisTrap column (GE Biosciences) pre-equilibrated with buffer A. The protein is eluted from the column using an FPLC with a linear gradient between buffer A and buffer B (10 mM HEPES, pH 7.5, 500 mM NaCl, 500 mM Imidazole). The eluted protein is dialyzed overnight in the presence of TEV protease to buffer C (10 mM HEPES, pH 7.5, 500 mM NaCl). The dialyzed protein is applied to a HisTrap column (GE Biosciences) pre-equilibrated with buffer C. 6×His-tagged TEV and 6×His-tagged thioredoxin are bound to the column and highly purified NBX is collected in the flowthrough. NBX proteins are dialyzed overnight to PBS and concentrated to ˜ 10 mg/ml.

Purification of V_{H}Hs from Pichia Pastoris

[0074] Pichia pastoris strain GS115 with constructs for the expression and secretion of 6×His-tagged V_{H}H are grown for 5 days at 30° C. with daily induction of 0.5% (vol/vol) methanol. Yeast cells are removed by centrifugation and the NBX-containing supernatant is spiked with 10 mM imidazole. The supernatant is applied to a HisTrap column (GE Biosciences) pre-equilibrated with buffer A (10 mM HEPES, pH 7.5, 500 mM NaCl). The protein is eluted from the column using an FPLC with a linear gradient between buffer A and buffer B (10 mM HEPES, pH 7.5, 500 mM NaCl, 500 mM Imidazole). NBX proteins are dialyzed overnight to PBS and concentrated to ˜10 mg/ml.

### 3. NBX Neutralization of NetB Cytotoxicity

[0075] Hepatocellular carcinoma-derived epithelial cells (LMH cells) from Gallus gallus strain Leghorn are adhered to the surface of a tissue-culture treated and gelatin-coated 96-well microtitre plate at 64,000 cells/well overnight at 37° C. and 5% CO₂. Recombinantly expressed NetB is preincubated with NBX at a range of concentrations or the buffer in which the NBXs are dissolved (20 mM HEPES pH 7.4, 150 mM NaCl) for 15 minutes at 37° C. and 5% CO₂. After 15 minutes the toxin/NBX mixtures are added to triplicate wells of LMH cells. The final concentration of NetB is 5 nM. The final concentrations of NBXs are 1, 3, 9, 27, 81, 243, 729, and 2187 nM. LMH cells with toxin/NBX mixtures are incubated for 5 hours at 37° C. and 5% CO₂. Cytotoxicity induced by NetB is measured using the Pierce LDH Cytotoxicity Assay Kit (Thermo Scientific) following the manufacturer's instructions. NetB percent cytotoxicity in the presence of NBX is determined relative to NetB cytotoxicity in the absence of NBX. A non-linear fit of the inhibitor concentration versus response is determined using GraphPad Prism 8 which generates the 50% inhibitory concentration (IC₅₀) which approximates the NBX concentration required to block 50% of the cytotoxicity of 5 nM NetB.

[0076] FIG. 4A shows the complete curves for four NBXs (NBX0324, NBX0365, NBX0880, and NBX0888). All four of which have IC₅₀ values below 100 nM and can inhibit NetB cytotoxicity by at least 90%.

[0077] Table 3 indicates, for all NBXs tested, whether the NBX can neutralize the activity of NetB against LMH cells with an IC₅₀-value less than 1 uM and/or less than 50 nM.

TABLE 3
Summary table for NBXs that neutralize NetB

| NBX Number | IC₅₀ < 1 μM | IC₅₀ < 50 nM |
|---|---|---|
| NBX0301 | Yes | No |
| NBX0303 | Yes | Yes |
| NBX0304 | No | No |
| NBX0305 | Yes | Yes |
| NBX0307 | Yes | Yes |
| NBX0308 | Yes | No |
| NBX0309 | Yes | Yes |
| NBX0310 | Yes | Yes |
| NBX0311 | Yes | No |
| NBX0318 | Yes | Yes |
| NBX0319 | Yes | Yes |
| NBX0322 | Yes | No |
| NBX0323 | Yes | No |
| NBX0324 | Yes | Yes |
| NBX0362 | Yes | No |
| NBX0364 | Yes | Yes |
| NBX0365 | Yes | Yes |
| NBX0366 | Yes | Yes |
| NBX0370 | Yes | No |
| NBX0371 | Yes | Yes |
| NBX0372 | Yes | No |
| NBX0373 | Yes | No |
| NBX0375 | Yes | Yes |
| NBX0376 | Yes | No |
| NBX0378 | Yes | No |
| NBX0379 | Yes | No |
| NBX0501 | Yes | Yes |
| NBX0502 | No | No |
| NBX0503 | Yes | Yes |
| NBX0504 | No | No |
| NBX0505 | Yes | Yes |
| NBX0506 | Yes | Yes |
| NBX0507 | Yes | Yes |
| NBX0508 | Yes | No |
| NBX0509 | No | No |
| NBX0510 | Yes | Yes |
| NBX0511 | Yes | Yes |
| NBX0512 | Yes | No |
| NBX0513 | Yes | No |
| NBX0538 | Yes | Yes |
| NBX0539 | Yes | Yes |
| NBX0540 | Yes | Yes |
| NBX0541 | Yes | No |
| NBX0542 | Yes | Yes |
| NBX0543 | Yes | No |
| NBX0544 | Yes | Yes |
| NBX0545 | Yes | Yes |
| NBX0546 | Yes | Yes |
| NBX0547 | Yes | No |
| NBX0548 | Yes | Yes |
| NBX0549 | Yes | Yes |
| NBX0550 | Yes | Yes |
| NBX0551 | Yes | Yes |
| NBX0552 | Yes | Yes |
| NBX0553 | Yes | Yes |
| NBX0877 | Yes | Yes |
| NBX0878 | Yes | Yes |
| NBX0879 | Yes | No |
| NBX0880 | Yes | Yes |
| NBX0881 | Yes | Yes |
| NBX0883 | Yes | Yes |
| NBX0884 | Yes | No |
| NBX0885 | Yes | Yes |
| NBX0886 | Yes | Yes |
| NBX0887 | Yes | Yes |
| NBX0888 | Yes | Yes |
| NBX0892 | Yes | Yes |
| NBX0893 | Yes | Yes |
| NBX0894 | Yes | Yes |
| NBX0895 | Yes | Yes |
| NBX08116 | Yes | Yes |
| NBX08117 | No | No |
| NBX08121 | No | No |
| NBX08122 | Yes | No |
| NBX08123 | Yes | Yes |
| NBX08127 | Yes | No |
| NBX08129 | Yes | Yes |
| NBX08149 | Yes | Yes |
| NBX08152 | Yes | Yes |
| NBX08155 | Yes | Yes |
| NBX21001 | Yes | Yes |
| NBX21009 | Yes | Yes |
| NBX21024 | Yes | Yes |
| NBX21029 | Yes | No |
| NBX21043 | Yes | Yes |
| NBX21044 | Yes | Yes |
| NBX21045 | Yes | Yes |
| NBX21046 | No | No |
| NBX21047 | No | No |
| NBX21049 | Yes | No |
| NBX21052 | Yes | Yes |
| NBX21055 | Yes | No |
| NBX21056 | Yes | Yes |
| NBX21057 | Yes | Yes |
| NBX21068 | Yes | Yes |
| NBX21069 | Yes | No |
| NBX21070 | Yes | No |
| NBX21071 | Yes | No |
| NBX21072 | Yes | Yes |
| NBX21073 | Yes | Yes |
| NBX21074 | No | No |
| NBX21075 | Yes | No |
| NBX21076 | No | No |
| NBX21077 | Yes | No |
| NBX21078 | Yes | No |
| NBX21080 | Yes | Yes |
| NBX21081 | Yes | Yes |
| NBX21082 | Yes | Yes |
| NBX21083 | Yes | Yes |
| NBX21084 | Yes | Yes |
| NBX21085 | Yes | Yes |
| NBX21086 | Yes | Yes |
| NBX25006 | No | No |
| NBX25007 | Yes | No |
| NBX25008 | Yes | No |
| NBX25009 | Yes | Yes |
| NBX25010 | Yes | Yes |
| NBX25011 | No | No |
| NBX25012 | No | No |
| NBX25013 | Yes | Yes |
| NBX25014 | Yes | Yes |
| NBX25015 | Yes | No |
| NBX25016 | No | No |
| NBX25017 | Yes | Yes |
| NBX25018 | Yes | No |

### 4. NBX Reduction of CnaA Collagen Binding

[0078] In a 96-well microtiter plate, 2 μg of collagen is incubated in 100 μl of PBS per well overnight at 4° C. The plate is washed with 200 μl of PBS and then blocked with 200 μl of 5% skim milk in PBS for 2 hours at 37° C. During the blocking step, 200 nM or 2 uM of individual NBXs are mixed with or without 100 nM of 6×-Histidine and Maltose-binding-protein (MBP) tagged CnaA in PBS for 30 minutes at 37° C. The plate is washed with 200 μl of PBS three times, and 100 μl of NBXs or NBX/MBP-CnaA mixture is added to each well for a 2-hour incubation at 37° C. After washing with 200 μl of PBS three times, 100 μl of 0.125 μg/ml of anti-His conjugated with HRP is added to each well and incubated for 1 hour at room temperature. The plate is then washed with 200 μl of PBS three times, and 100 μl of TMB substrate is added to each well and allowed to develop for 30 minutes. To stop the reaction, 50 μl of 1 M HCl is added to each well. Absorbance of the plate at 450 nm is read to quantify binding. To quantify the reduction of CnaA binding to collagen in the presence of NBX, a percent reduction is calculated relative to the binding of CnaA in the absence of NBX (100% binding).

[0079] Table 4 indicates, for all NBXs tested, whether the NBX can reduce binding of CnaA to collagen by more than 50% when the NBX is supplied at 2 μM and/or at 200 nM.

TABLE 4
Summary table for NBXs that neutralize CnaA

| | Collagen-binding | Collagen-binding |
|---|---|---|
| NBX | reduced by >50% | reduced by >50% |
| Number | at 2 μM* | at 200 nM |
| NBX0316 | Yes | Yes |
| NBX0317 | Yes | Yes |
| NBX0325 | Yes | Yes |
| NBX0326 | Yes | Yes |
| NBX0327 | No | No |
| NBX0514 | No | No |
| NBX0515 | No | No |
| NBX0518 | No | No |
| NBX0520 | Yes | No |
| NBX0521 | No | No |
| NBX0522 | Yes | Yes |
| NBX0523 | No | No |
| NBX0524 | No | No |
| NBX0526 | No | No |
| NBX0527 | No | No |
| NBX0528 | Yes | Yes |
| NBX0529 | No | No |
| NBX0530 | Yes | Yes |
| NBX0531 | Yes | Yes |
| NBX0532 | No | No |
| NBX0533 | No | No |
| NBX0534 | Yes | Yes |
| NBX0535 | Yes | Yes |
| NBX0537 | No | No |
| NBX0801 | Yes | No |
| NBX0802 | Yes | No |
| NBX0803 | Yes | Yes |
| NBX0804 | Yes | Yes |
| NBX0805 | No | No |
| NBX0806 | No | No |
| NBX0807 | Yes | Yes |
| NBX0808 | Yes | No |
| NBX0809 | Yes | Yes |
| NBX0811 | Yes | Yes |
| NBX0812 | Yes | Yes |
| NBX0847 | Yes | No |
| NBX0866 | Yes | Yes |
| NBX0867 | Yes | No |
| NBX0868 | Yes | No |
| NBX0869 | Yes | Yes |
| NBX0870 | No | No |
| NBX0871 | No | No |
| NBX0872 | Yes | No |
| NBX0873 | Yes | Yes |
| NBX0874 | Yes | Yes |
| NBX0875 | Yes | Yes |
| NBX0876 | Yes | Yes |
| NBX0896 | Yes | No |
| NBX0897 | Yes | No |
| NBX0898 | Yes | No |
| NBX0899 | Yes | Yes |
| NBX08100 | Yes | Yes |
| NBX08101 | Yes | Yes |
| NBX08102 | Yes | Yes |
| NBX08103 | Yes | No |
| NBX08104 | Yes | Yes |
| NBX08105 | Yes | Yes |
| NBX08106 | Yes | Yes |
| NBX08107 | Yes | Yes |
| NBX08108 | Yes | Yes |
| NBX0517 | N.D. | No |
| NBX0519 | N.D. | No |
| NBX0561 | Yes | No |
| NBX0572 | N.D. | No |
| NBX0573 | N.D. | No |
| NBX0575 | N.D. | Yes |
| NBX0576 | N.D. | No |
| NBX0577 | N.D. | No |
| NBX0578 | N.D. | No |
| NBX0579 | N.D. | No |
| NBX0580 | N.D. | No |
| NBX0581 | N.D. | No |
| NBX0582 | N.D. | No |
| NBX0584 | N.D. | No |
| NBX0585 | N.D. | No |
| NBX08138 | N.D. | Yes |
| NBX08139 | N.D. | No |
| NBX08140 | N.D. | No |
| NBX08141 | N.D. | Yes |
| NBX08142 | N.D. | Yes |
| NBX08143 | N.D. | Yes |
| NBX08144 | N.D. | Yes |
| NBX08145 | N.D. | Yes |
| NBX11001 | N.D. | No |
| NBX11002 | N.D. | Yes |
| NBX11004 | N.D. | Yes |
| NBX11005 | N.D. | No |
| NBX11007 | N.D. | No |
| NBX11008 | N.D. | Yes |
| NBX11009 | N.D. | Yes |
| NBX11010 | N.D. | Yes |
| NBX11011 | N.D. | Yes |
| NBX11012 | N.D. | Yes |
| NBX11013 | N.D. | Yes |
| NBX11014 | N.D. | Yes |
| NBX11015 | N.D. | Yes |
| NBX11016 | N.D. | Yes |
| NBX11017 | N.D. | Yes |
| NBX11018 | N.D. | Yes |
| NBX11019 | N.D. | Yes |
| NBX11020 | N.D. | Yes |
| NBX11021 | N.D. | No |
| NBX11022 | N.D. | Yes |
| NBX11023 | N.D. | No |
| NBX11024 | N.D. | No |
| NBX11025 | N.D. | No |
| NBX11026 | N.D. | No |
| NBX11027 | N.D. | Yes |
| NBX11028 | N.D. | No |
| NBX11029 | N.D. | No |
| NBX11032 | N.D. | Yes |
| NBX11034 | N.D. | No |
| NBX11035 | N.D. | Yes |
| NBX11036 | N.D. | Yes |
| NBX11037 | N.D. | No |
| NBX11038 | N.D. | Yes |
| NBX11039 | N.D. | No |
| NBX11040 | N.D. | Yes |
| NBX11041 | N.D. | Yes |
| NBX11042 | N.D. | Yes |
| NBX11043 | N.D. | Yes |
| NBX11044 | N.D. | Yes |
| NBX11045 | N.D. | No |
| NBX11046 | N.D. | Yes |
| NBX11047 | N.D. | No |
| NBX11048 | N.D. | Yes |
| NBX11049 | N.D. | Yes |
| NBX11050 | N.D. | No |
| NBX11051 | N.D. | No |
| NBX11052 | N.D. | No |
| NBX11053 | N.D. | No |
| NBX11054 | N.D. | No |
| NBX22019 | N.D. | No |
| NBX22020 | N.D. | Yes |
| NBX22021 | N.D. | No |
| NBX22022 | N.D. | No |
| NBX22023 | N.D. | No |
| NBX22024 | N.D. | No |
| NBX22025 | N.D. | No |
| NBX22029 | N.D. | No |
| NBX22030 | N.D. | No |
| NBX22031 | N.D. | Yes |
| NBX22032 | N.D. | No |
| NBX22033 | N.D. | No |
| NBX22034 | N.D. | No |
| NBX22035 | N.D. | No |
| NBX22039 | N.D. | No |
| NBX22040 | N.D. | No |
| NBX22041 | N.D. | No |
| NBX22042 | N.D. | Yes |
| NBX22043 | N.D. | No |
| NBX22044 | N.D. | No |
| NBX22045 | N.D. | No |
| NBX22046 | N.D. | No |
| NBX22055 | N.D. | No |
| NBX22056 | N.D. | Yes |
| NBX22057 | N.D. | No |
| NBX22058 | N.D. | No |
| NBX22059 | N.D. | No |
| NBX22060 | N.D. | No |
| NBX22061 | N.D. | Yes |
| NBX22062 | N.D. | No |
| NBX22063 | N.D. | Yes |
| NBX22064 | N.D. | No |
| NBX22065 | N.D. | Yes |
| NBX22066 | N.D. | No |
| NBX22067 | N.D. | Yes |
| NBX22068 | N.D. | Yes |
| NBX22069 | N.D. | Yes |
| NBX22070 | N.D. | Yes |
| NBX22083 | N.D. | No |
| NBX22084 | N.D. | No |
| NBX22085 | N.D. | No |
| NBX22086 | N.D. | No |
| NBX22087 | N.D. | No |
| NBX22088 | N.D. | No |
| NBX22089 | N.D. | No |
| NBX22090 | N.D. | No |
| NBX22093 | N.D. | Yes |
| NBX22094 | N.D. | Yes |
| NBX22095 | N.D. | Yes |
| NBX22096 | N.D. | No |
| NBX22097 | N.D. | Yes |
| NBX22098 | N.D. | Yes |
| NBX22099 | N.D. | No |
| NBX22100 | N.D. | Yes |
| NBX22101 | N.D. | Yes |
| NBX22102 | N.D. | Yes |
| NBX22103 | N.D. | Yes |
| NBX22104 | N.D. | Yes |
| NBX22105 | N.D. | Yes |
| NBX22106 | N.D. | No |
| NBX22107 | N.D. | Yes |
| NBX22108 | N.D. | No |
| NBX22109 | N.D. | Yes |
| NBX22110 | N.D. | Yes |
| NBX22111 | N.D. | Yes |
| NBX22112 | N.D. | Yes |
| NBX22119 | N.D. | No |
| NBX22120 | N.D. | No |
| NBX22121 | N.D. | Yes |
| NBX22122 | N.D. | Yes |
| NBX22123 | N.D. | Yes |
| NBX22124 | N.D. | No |
| NBX22125 | N.D. | Yes |
| NBX22126 | N.D. | Yes |
| NBX22127 | N.D. | No |
| NBX22128 | N.D. | Yes |

*N.D.: CnaA-Collagen binding reduction not determined at NBX concentration of 2 μM. Binding reduction only determined at NBX concentration of 200 nM.

[0080] For a selection of NBXs the CnaA-collagen binding assay was modified to test a larger range of NBX concentrations and calculate IC₅₀ values. The concentrations of NBXs tested were 12.5, 25, 50, 100, 200, 400, 800, and 1600 nM.

[0081] FIG. 4B shows the inhibition of CnaA binding to collagen for two NBXs (NBX08108 and NBX11002) which reduced CnaA binding to collagen by at least 50% with IC₅₀ values below 200 nM.

### 5. NBX Neutralization of Cpa Lecithinase Activity

[0082] Cpa is mixed with NBX or PBS to achieve a final concentration of 100 nM (Cpa) and 1 uM (NBX) in a total store-bought, free-range eggs by separation from the white. The yolk is punctured carefully then 5 ml is removed and mixed thoroughly with 45 ml PBS to create a 10% solution. The solution is centrifuged at 500 g to remove large aggregates and then passed through a 0.45 um GD/X syringe filter. 60 μl of the filtered yolk solution is added to the Cpa or Cpa/NBX wells to achieve a final concentration of 5% v/v egg yolk. The plate is incubated for 1 hr at 37° C. after which the optical density of the plate is measured at 620 nm. NBX neutralization of Cpa lecithinase activity is determined relative to Cpa lecithinase activity in the absence of NBX (100%).

[0083] Table 5 indicates, for all NBXs tested, whether the NBX can reduce Cpa lecithinase activity by more than 40% when the NBX is supplied at 1 uM.

TABLE 5
Summary table for NBXs that neutralize Cpa

| | Cpa lecithinase activity |
|---|---|
| NBX Number | reduced by >40% at 1 μM |
| NBX0329 | Yes |
| NBX0330 | No |
| NBX0338 | Yes |
| NBX0339 | Yes |
| NBX0340 | No |
| NBX0341 | No |
| NBX03161 | No |
| NBX03162 | No |
| NBX03163 | Yes |
| NBX03164 | Yes |
| NBX03165 | Yes |
| NBX03167 | Yes |
| NBX03168 | Yes |
| NBX03169 | Yes |
| NBX03170 | Yes |
| NBX03171 | Yes |
| NBX03172 | Yes |
| NBX03173 | No |
| NBX03174 | No |
| NBX03175 | No |
| NBX03176 | Yes |
| NBX03177 | No |
| NBX03179 | Yes |
| NBX03180 | Yes |
| NBX03181 | Yes |
| NBX0587 | No |

### 6. Untagged CnaA Provided in Excess Outcompetes Tagged CnaA for Collagen Binding

[0084] In a 96-well microtiter plate, 2 μg of collagen is incubated in 100 μl of PBS per well overnight at 4° C. The plate is washed with 200 μl of PBS and then blocked with 200 μl of 5% skim milk in PBS for 2 hours at 37° C. During the blocking step, 100 nM of 6×-Histidine and Maltose-binding-protein (MBP) tagged CnaA is mixed with between 0 and 2000 nM untagged CnaA in PBS for 30 minutes at 37° C. The plate is washed with 200 μl of PBS three times, and 100 μl of MBP-CnaA or MBP-CnaA/untagged CnaA mixture is added to each well for a 2-hour incubation at 37° C. After washing with 200 μl of PBS three times, 100 μl of 0.125 ug/ml of anti-His conjugated with HRP is added to each well and incubated for 1 hour at room temperature. The plate is then washed with 200 μl of PBS three times, and 100 μl of TMB substrate is added to each well and allowed to develop for 30 minutes. To stop the reaction, 50 μl of 1 M HCl is added to each well. Absorbance of the plate at 450 nm is read to quantify binding.

[0085] FIG. 3 shows the reduction of binding of MBP-CnaA to collagen in the presence of increasing concentrations of untagged CnaA.

### 7. NBX Stability in Chicken Jejunal Extracts

[0086] Experiments were conducted by thawing frozen chicken jejunum extract and NBX at room temperature, and immediately placing both on ice. Chicken jejunum extract and protein were spun at 10,000 RCF for 1 minute to pellet and remove any precipitation. PBS and saline were prechilled on ice. Two reactions were set up in volumes of 10 μl on ice. The first reaction contained no chicken jejunum extract and consisted of 5 μg NBX in 3.2 μL PBS and 4.8 μL of 150 mM NaCl. The second reaction contained chicken jejunum extract and was generated using the following ratios: 2.4 μL chicken jejunum extract, 5 μg NBX in 0.8 μL PBS, and 4.8 μL of 150 mM NaCl. The tubes were incubated on ice for 5 minutes, followed by 42° C. for up to 24 hours. The final incubation temperature (42° C.) is the internal temperature of a chicken. After incubation, 8 μL of preheated 2×SDS sample buffer was added to stop the reaction, and the sample was boiled at 95-100° C. for 5 minutes. The stability of each NBX was assessed by the presence or absence of the NBX on an 18% SDS-PAGE gel.

[0087] FIG. 4C shows the stability of six NBXs (NBX0324, NBX0365, NBX0880, NBX0888, NBX08108, and NBX11002) in the presence of the chicken jejunum extract.

### 8. NBX Reduction of Poultry Necrotic Enteritis

Preparation of Bacillus subtilis Secreting NBXs

[0088] Bacillus subtilis strain PY79 (obtained from the Bacillus Genetic Stock Center). Bacillus subtilis clones secreting individual NBXs were created for NBX0324 (SEQ ID 20), NBX0365 (SEQ ID 216), NBX0880 (SEQ ID 313), NBX0888 (SEQ ID 320), NBX08108 (SEQ ID 340), and NBX11002 (SEQ ID 758). NBX genes were integrated into the Bacillus subtilis genome using established protocols known in the art (^{9,10}).

### Preparation of Enteric Coated Yeast Extracts Containing NBXs

[0089] Pichia pastoris strains BG10 and BG11 and the expression vector pD912 were obtained from ATUM. NBX0324 (SEQ ID 20), NBX0365 (SEQ ID 216), NBX0880 (SEQ ID 313), NBX0888 (SEQ ID 320), NBX08108 (SEQ ID 340), and NBX11002 (SEQ ID 758) were cloned individually into pD912 and clones of P. pastoris strains BG10 and BG11 expressing each of the six NBXs were created following protocols provided by ATUM. P. pastoris strain BG10 expressing NBX0365 (SEQ ID 216) was commercially grown in a fermenter by EUCODIS Bioscience. P. pastoris strain BG11 expressing NBX0324 (SEQ ID 20), NBX0880 (SEQ ID 313), NBX0888 (SEQ ID 320), NBX08108 (SEQ ID 340), or NBX11002 (SEQ ID 758) were commercially grown in fermenters by the National Center in Environmental Technology and Electrochemistry (CNETE). For all fermentation products, the cell biomass was removed by centrifugation, the NBX containing supernatants were filtered to remove media components and other small molecules, concentrated, and freeze-dried.

[0090] The dried yeast extracts containing NBXs were mixed and encapsulated in a proprietary lipid-based matrix by Jefo Nutrition at an inclusion rate of 18%. The purpose of the matrix is to protect the NBXs through the upper gastrointestinal tract. Necrotic enteritis challenge

[0091] Five hundred sixty chicks were assigned to seven treatment groups with eight cages per treatment and ten chicks per cage. Treatment groups were assigned to cages using randomized complete block. The study began when chicks were placed (day-of-hatch; day 0), at which time chicks were allocated to experimental cages. Only healthy birds were selected. Chicks were raised in Petersime style battery cages (stocking density of 0.63 square feet per bird) in a solid-sided barn and maintained under ambient humidity. Feed and water were available ad libitum throughout the trial. Each cage contained one trough feeder and one trough drinker (10 bird to feeder/drinker ratio, 24-inch×3.5-inch trough).

[0092] All birds were weighed by pen on days 0, 14, 22, and 28. Feed added to each pen's feeder was weighed at the beginning of each formulation period on days 0 and 14. Any additional bags of feed were weighed (and documented) for each pen (as required) during each formulation period. Feed was distributed as needed to feeders from pre-weighed bags (assigned to each pen) throughout each period. Feed remaining in feeders (and feed bags if applicable) were weighed and disposed of on days 14, 22, and 28. Empty pan feeder weights were recorded prior to study initiation. The trial was terminated on day 28.

[0093] The necrotic enteritis challenge model consisted of approximately 2,000-5,000 Eimeria maxima oocysts gavaged on day 14 as the predisposing factor and Clostridium perfringens gavaged on days 19 and 20 using 1.0 mL at a concentration of 1.0×10⁸ CFU/mL per Table 6.

[0094] Table 6 describes the various treatment groups which consisted of non-challenged and untreated control (T1), challenged and untreated control (T2), challenged and antibiotic treated control (T3), challenged and treated with a cocktail of six NBXs collected as a supernatant extract from Pichia pastoris fermentation and enteric coated (T4), challenged and treated with an off-target NBX collected as supernatant extract from Pichia pastoris fermentation and enteric coated (T5), challenged and treated with Bacillus subtilis spores from six strains each secreting a different NBX (T6), and challenged and treated with Bacillus subtilis spores of a strain that does not secrete and NBX (T7).

TABLE 6
Necrotic Enteritis Challenge Experimental Design

| | | Necrotic | Dose of Test Article | Dose of Test |
|---|---|---|---|---|
| Treatment | | Enteritis | in Starter Feed | Article in Feed |
| Group | Treatment | Challenge | (days 0-18) | (days 18-28) |
| T1 | Non-challenge | No | None | None |
| | Control | | | |
| T2 | Challenge Control | Yes | None | None |
| T3 | Bacitracin methylene | Yes | None | 55 gram/metric |
| | disalicylate (BMD) | | | ton |
| T4 | Enteric coated active | Yes | None | 5.3 gram/kg |
| | NBX | | | |
| T5 | Enteric coated off- | Yes | None | 4.3 gram/kg |
| | target NBX | | | |
| T6 | Bacillus subtilis | Yes | 6 × 10⁹ CFU per kg | 6 × 10⁹ CFU per kg |
| | secreting active NBX | | | |
| T7 | Bacillus subtilis with | Yes | 6 × 10⁹ CFU per kg | 6 × 10⁹ CFU per kg |
| | no NBX secretion | | | |

[0095] The six NBXs present in treatment groups T4 and T6 are NBX0324 (SEQ ID 20), NBX0365 (SEQ ID 216), NBX0880 (SEQ ID 313), NBX0888 (SEQ ID 320), NBX08108 (SEQ ID 340), and NBX11002 (SEQ ID 758).

[0096] Table 7 indicates the effects of different treatments on necrotic enteritis mortality. Enteric coated active NBXs reduced mortality similarly to the antibiotic control. Bacillus subtilis secreting active NBX showed the greatest reduction in mortality and was the only treatment group (including the antibiotic control) where the reduction compared to treatment group T2 was statistically significant.

TABLE 7
Clinical Necrotic Enteritis Results

| Treatment | | Necrotic Enteritis | |
|---|---|---|---|
| Group | Treatment | Percent Mortality* | |
| T1 | Non-challenge Control | 0.00 | (C) |
| T2 | Challenge Control | 23.75 | (A) |
| T3 | Bacitracin methylene disalicylate | 11.25 | (A, B, C) |
| | (BMD) | | |
| T4 | Enteric coated active NBX | 11.25 | (A, B, C) |
| T5 | Enteric coated off-target NBX | 17.5 | (A, B) |
| T6 | Bacillus subtilis secreting active NBX | 7.5 | (B, C) |
| T7 | Bacillus subtilis with no NBX secretion | 15 | (A, B) |

*Values that share a letter in the brackets are not statistically significantly different based on a t-test and a significance level of p < 0.05.

[0097] Table 8 indicates the effects of treatments on chicken growth performance. Performance results were calculated as previously described (11). Treatment Group T6 (Bacillus subtilis secreting active NBX) improves the feed intake and weight gain of challenged chickens at a level comparable to the positive control antibiotic (T3, BMD). Treatment Group T6 (Bacillus subtilis secreting active NBX) provides the best improvement to challenged chickens in terms of the non-adjusted feed conversion ratio, even better than the positive control antibiotic (T3, BMD).

TABLE 8
Day 0 to Day 28 Performance Results

| | | | | Non-Adjusted | | | |
|---|---|---|---|---|---|---|---|
| Treatment | | Feed Intake | | Feed Conversion | | Weight Gain | |
| Group | Treatment | (kg/cage)* | | Ratio* | | (kg)* | |
| T1 | Non-challenge | 15.50 | (A) | 1.437 | (C) | 1.121 | (A) |
| | Control | | | | | | |
| T2 | Challenge Control | 13.11 | (D, E) | 1.972 | (A) | 1.009 | (B, C, D) |
| T3 | Bacitracin | 15.13 | (A, B) | 1.691 | (A, B, C) | 1.090 | (A, B) |
| | methylene | | | | | | |
| | disalicylate (BMD) | | | | | | |
| T4 | Enteric coated | 13.44 | (C, D, E) | 1.698 | (A, B, C) | 0.993 | (B, C, D) |
| | active NBX | | | | | | |
| T5 | Enteric coated off- | 12.31 | (E) | 1.806 | (A, B) | 0.958 | (C, D) |
| | target NBX | | | | | | |
| T6 | Bacillus subtilis | 14.48 | (A, B, C) | 1.564 | (B, C) | 1.091 | (A, B) |
| | secreting active NBX | | | | | | |
| T7 | Bacillus subtilis with | 13.89 | (B, C, D) | 1.757 | (A, B) | 1.035 | (A, B, C) |
| | no NBX secretion | | | | | | |

*Values within a given column that share a letter in the brackets are not statistically significantly different based on a t-test and a significance level of p < 0.05.

[0098] While preferred embodiments of the present invention have been shown and described herein, it will be obvious to those skilled in the art that such embodiments are provided by way of example only. Numerous variations, changes, and substitutions will now occur to those skilled in the art without departing from the invention. It should be understood that various alternatives to the embodiments of the invention described herein may be employed in practicing the invention. It is intended that the following claims define the scope of the invention and that methods and structures within the scope of these claims and their equivalents be covered thereby.

[0099] The complete disclosure of all patents, patent applications, and publications, and electronically available material (including, for instance, nucleotide sequence submissions in, e.g., GenBank and RefSeq, and amino acid sequence submissions in, e.g., SwissProt, PIR, PRF, PDB, and translations from annotated coding regions in GenBank and RefSeq) cited herein are incorporated by reference. In the event that any inconsistency exists between the disclosure of the present application and the disclosure(s) of any document incorporated herein by reference, the disclosure of the present application shall govern. The foregoing detailed description and examples have been given for clarity of understanding only. No unnecessary limitations are to be understood therefrom. The invention is not limited to the exact details shown and described, for variations obvious to one skilled in the art will be included within the invention defined by the claims.

[0100] All publications, patent applications, issued patents, and other documents referred to in this specification are herein incorporated by reference as if each individual publication, patent application, issued patent, or other document is specifically and individually indicated to be incorporated by reference in its entirety. Definitions that are contained in text incorporated by reference are excluded to the extent that they contradict definitions in this disclosure.

[0101] The following references are incorporated by reference in their entirety.
[0102] 1. Wade, B. & Keyburn, A. (2015). The true cost of necrotic enteritis. World Poultry, 31, pp. 16-17
[0103] 2. Moore, R. J. (2016). Necrotic enteritis predisposing factors in broiler chickens. Avian Pathology, 45 (3), pp. 275-281.
[0104] 3. Abid, S. A. et al. (2016). Emerging threat of necrotic enteritis in poultry and its control without use of antibiotics: a review. The Journal of Animal and Plant Sciences, 26 (6), pp. 1556-1567.
[0105] 4. Prescott, J. F. et al. (2011). The pathogenesis of necrotic enteritis in chickens: what we know and what we need to know: a review. Avian Pathology, 45 (3), pp. 288-294.
[0106] 5. Collier, C. T. et al. (2008) Coccidia-induced mucogenesis promotes the onset of necrotic enteritis by supporting Clostridium perfringens growth. Veterinary Immunology and Immunopathology, 122 (1-2), pp. 104-115.
[0107] 6. Van Meirhaeghe, H. & De Gussem, M. (2014). Coccidiosis a major threat to the chicken gut. Poultry World.
[0108] 7. Chapman, H. D. (2014). Milestones in avian coccidiosis research: a review. Poultry Science, 93 (3), pp. 501-511.
[0109] 8. Shivaramaiah, S. et al. (2011). The role of an early Salmonella Typhimurium infection as a predisposing factor for necrotic enteritis in a laboratory challenge model. Avian Diseases, 55 (2), pp. 319-323.
[0110] 9. Zeigler, D. R. (2002). Bacillus Genetic Stock Center; Catalog of Strains, 7^{th} Edition; Volume 4: Integration Vectors of Gram-Positive Organisms.
[0111] 10. Yang, M. et al. (2020). Engineering Bacillus subtilis as a versatile and stable platform for production of nanobodies. Applied and Environmental Microbiology, 86 (8), Article e02938-19.
[0112] 11. Hofacre, W. G. et al. (1998). Use of Aviguard and other intestinal bioproducts in experimental Clostridium perfrigens-associated necrotizing enteritis in broiler chickens. Avian Disease, 42 (3), pp. 579-584.

What is claimed is:

1. A polypeptide comprising at least one variable region fragment of a heavy chain antibody (V_{H}H) having an amino acid sequence at least 99% identical to any one of SEQ ID NOs: 1 to 56 or 212 to 340 or 695 to 968 or 1791 to 1795,
wherein the polypeptide is capable of a) reducing the cytotoxicity of NetB with an IC50 value less than 1 mM by at least 90%; b) reducing the binding of CnaA to collagen by greater than 50% at 2 uM; or c) reducing Cpa lecithinase activity by greater than 40% at 1 uM.

2. The polypeptide of claim 1, wherein the V_{H}H comprises:
a) a complementarity determining region 1 (CDR1) as set forth in any one of SEQ ID NOs: 57 to 106 or 341 to 458 or 969 to 1242 or 1796 to 1800,
b) a complementarity determining region 2 (CDR2) as set forth in any one of SEQ ID NOs: 107 to 156 or 459 to 576 or 1243 to 1516 or 1801 to 1805, and
c) a complementarity determining region 3 (CDR3) as set forth in any one of SEQ ID NOs: 157 to 206 or 577 to 694 or 1517 to 1790 or 1806 to 1810.

3. The polypeptide of claim 1, wherein the polypeptide comprises a plurality of V_{H}HS.

4. The polypeptide of claim 3, wherein the plurality of V_{H}Hs is identical to another V_{H}H of the plurality of V_{H}Hs.

5. The polypeptide of claim 3, wherein the plurality of V_{H}Hs comprises at least three V_{H}Hs.

6. The polypeptide of claim 3, wherein the plurality of V_{H}Hs are covalently coupled to one another by a linker, the linker comprising one or more amino acids.

7. A polypeptide complex comprising the polypeptides of claim 1, wherein the polypeptide complex comprises:
a) a first component polypeptide, and
b) a second component polypeptide,
wherein the first component polypeptide and the second component polypeptide are not covalently linked together and are coupled together by a protein-protein interaction, a small molecule-protein interaction, or a small molecule-small molecule interaction, and
wherein each of the first and the second component polypeptides comprise a V_{H}H which specifically binds a pathogen.

8. The polypeptide of claim 7, wherein the pathogen is a poultry-associated bacterium.

9. The polypeptide of claim 8, wherein the poultry-associated bacterium comprises a species of Clostridium.

10. The polypeptide of claim 9, wherein the species of Clostridium is Clostridium perfringens.

11. The polypeptide of claim 1, wherein the V_{H}H specifically binds a Clostridium virulence factor, wherein the Clostridium virulence factor is NetB polypeptide, NetB-like toxin polypeptide, Cpa polypeptide, Cpa-like toxin polypeptide, Cpb2 polypeptide, Cpb2-like toxin polypeptide, CnaA polypeptide, CnaA-like polypeptide, CnaA collagen binding domain polypeptide, or CnaA collagen binding domain-like polypeptide.

12. The polypeptide of claim 1, wherein the V_{H}H specifically binds an antigen or polypeptide at least 99% identical to SEQ ID NOs: 207, 208, 209, 210, 211 or combinations thereof.

13. The polypeptide of claim 1 further comprising a vitamin, an antibiotic, a hormone, an antimicrobial peptide, a steroid, a probiotic, a probiotic, a bacteriophage, chitin, chitosan, B-1,3-glucan, vegetable extracts, peptone, shrimp meal, krill, algae, B-cyclodextran, alginate, gum, tragacanth, pectin, gelatin, an additive spray, a toxin binder, a short chain fatty acid, a medium chain fatty acid, yeast, a yeast extract, sugar, a digestive enzyme, a digestive compound, an essential mineral, an essential salt, or fiber.

14. A vector or a cell comprising a nucleic acid or a plurality of nucleic acids encoding the polypeptide of claim 1.

15. The vector or cell of claim 14, wherein the polypeptide is produced by incubating the cell in a medium suitable for secretion of the polypeptide from the cell and purifying the polypeptide from the medium.

16. A method of of reducing the activity of a Clostridium perfringens virulence factor comprising administering to a poultry animal, a non-poultry animal species, or human individual a polypeptide at least 99% identical to SEQ IDs Nos: 207, 208, 209, 210, 211, or combinations thereof.

17. The method of claim 16, wherein the method reduces or prevents a poultry-associated bacterial infection or reduces transmission or prevents transmission of a poultry-associated bacterial from the poultry species to another poultry animal, another animal species, or human individual.

18. The method of claim 16, wherein the poultry animal is a species of a chicken, turkey, duck, quail, pigeon, squab, ostrich, or goose and the non-poultry animal species is a pig, sheep, goat, horse, cow, llama, alpaca, mink, rabbit, dog, cat, or human.

19. The method of claim 16, wherein the polypeptide is adapted for introduction to the alimentary canal orally or rectally, provided to the exterior surface (for example, as a spray or submersion), provided to the medium in which the animal dwells (including air based media), provided by injection, provided intravenously, provided via the respiratory system, provided via diffusion, provided via absorption by the endothelium or epithelium, or provided via a secondary organism such as a yeast, bacterium, algae, bacteriophages, plants and insects to a host.

20. The method of claim 16, wherein the polypeptides of SEQ ID NOs: 210 or 211 can outcompete Clostridium perfringens surface-expressed CnaA binding to collagen by 10%, 20%, 30%, 40%, 50%, 60%, 70%, 80%, 90%, 95%, 99%, or 100%.

The application's sequence listing, which the Patent Office published only in electronic form, follows.

SEQUENCE LISTING (1810 sequences)

SEQ ID NO: 1 - protein, 125 aa, synthetic construct
  REGION 1..125: note = Synthetic
QVQLQESGGGVVQAGGSLSLSCSPYQRASSLFAMGWFRQSPGKEREFVAGISWNGDKSQYADSVKDRFTISRDNDKNTVFLQMNSLKPEDTAVYYCAAHRASFELGFATHDYDFWGQGTQVTVSS

SEQ ID NO: 2 - protein, 111 aa, synthetic construct
  REGION 1..111: note = Synthetic
QVQLQESGGGLVQTGGSLRLSCVASGSIFSISSAVWSRQAPGKQREWVASIFSDGSTNYATSVKGRFTISRDHAKNTVYLQMNSLKPEDTGVYYCAVDGYRGQGTQVTVSS

SEQ ID NO: 3 - protein, 124 aa, synthetic construct
  REGION 1..124: note = Synthetic
QVQLQESGGGLVQAGGSLRLSCTASGRTLSYWTMGWFRQAPGKEREFVAAINWSSGTRYSDSVRDRFTIDGDTDKTTVYLEMNKMNLDDSAVYYCAAHRASFGLGYQTHEYDFWGQGTQVTVSS

SEQ ID NO: 4 - protein, 118 aa, synthetic construct
  REGION 1..118: note = Synthetic
QVQLQESGGGLVQTGDSLRLSCTASGGTFSSYTMGWYRQAPGKGREFVGSITWNSEVTYYADSVKGRFTISRDNAKNMMNLQMNSLKPEDTAVYYCAAGRAGSGFTSWGQGTQVTVSS

SEQ ID NO: 5 - protein, 131 aa, synthetic construct
  REGION 1..131: note = Synthetic
QVQLQESGGGLVQPGGSLRLSCTASGFTLDKYAVGWFRQAPGKEREGVSCISSIDDSTDYVDSVKGRFTISRDNAKNAVYLQMNSLKPEDTAVYNCMTIPLPYGSTCDIPSRSDLLAINYWGKGTLVTVSS

SEQ ID NO: 6 - protein, 126 aa, synthetic construct
  REGION 1..126: note = Synthetic
QVQLQQSGGGLVQPGGSLRLSCTASGFTVPYYYIGWFRQAPGKEREGISCIASSSGKAYYADSVKGRFTLSKDNAKNTAYLQMDSLKPEDTAVYYCAALRKYGSTCYLHVLEYDYWGQGTQVNVSS

SEQ ID NO: 7 - protein, 124 aa, synthetic construct
  REGION 1..124: note = Synthetic
QVQLQESGGGLVQAGGSLRLSCTASGRTLSYWTMGWFRQVPGKEREFVAAINWSSGTRYSESVRDRFTIDGDTDKTTVYLEMNKMNLDDSAVYYCAAHRASFGLGYQTHEYDFWGQGTQVTVSS

SEQ ID NO: 8 - protein, 124 aa, synthetic construct
  REGION 1..124: note = Synthetic
QVQLQQSGGGLVQAGGSLRLSCTASGRTLSYWTMGWFRQVPGKEREFVAAINWSSGTRYSESVRDRFTIDGDTDKTTVYLEMNKMNLDDSAVYYCAAHRASFGLGYQTHEYDFWGQGTQVTVSS

SEQ ID NO: 9 - protein, 124 aa, synthetic construct
  REGION 1..124: note = Synthetic
QVQLQQSGGGLVQAGGSLRLSCAASGSTFNNYMIGWFRQAPGKEREFVATISGSGAGTFYADSVRGRFTISRDNAKNTVYLQMNSLKLEDTAGYYCARRMSRSGIFGLRDYDSWGQGTQVTVSS

SEQ ID NO: 10 - protein, 125 aa, synthetic construct
  REGION 1..125: note = Synthetic
QVQLQQSGGGVVQAGGSLSLSCSPYQRASSLFAMGWFRQSPGKEREFVAGISWNGDKSQYADSVKDRFTISRDNDKNTVFLQMNSLKPEDTAVYYCAAHRASFELGFATHDYDFWGQGTQVTVSS

SEQ ID NO: 11 - protein, 121 aa, synthetic construct
  REGION 1..121: note = Synthetic
QVQLQESGGGLVQAGGSLRLSCAASGRTFSNADMAWFRQSPGKERESVAAISWSGGRTYYADSVKGRATISRDIAKDTVYLQMNSLKPEDTAVYYCAAGGYSNLPTSYGYWGQGTQVTVSS

SEQ ID NO: 12 - protein, 122 aa, synthetic construct
  REGION 1..122: note = Synthetic
QVQLQESGGGLVQTGGSLRLSCAASGRAFSTYGMGWFRQAPGKEREFVAGISSSGAGSAYVDSVKHRFTVSRDNAKNTMYLQMNSLKPEDTAVYYCAASTTSWGKFAHYIYWGQGTQVTVSS

SEQ ID NO: 13 - protein, 126 aa, synthetic construct
  REGION 1..126: note = Synthetic
QVQLQESGGGLVQAGGSLRLSCAASGGTFSSYIMGWFRQAPGKDREFVGAISWSGGVTHYADSVKGRFTISRDNAKNTVYLQMNSLKPEDTAVYYCAADSRISAGGSYYEADFGSWGQGTQVTVSS

SEQ ID NO: 14 - protein, 114 aa, synthetic construct
  REGION 1..114: note = Synthetic
QVQLQESGGGLVQAGGSLRLSCVVSGSIMSIRVMGWYRQAPGKQRELVATMSRGNTINYADSVRGRFTISRDNAKSTVYLQMNSLKPEDTDVYYCAALLDSYYWGQGTQVTVSS

SEQ ID NO: 15 - protein, 114 aa, synthetic construct
  REGION 1..114: note = Synthetic
QVQLQESGGGLVQAGGSLRLSCAASASIISIRVMGWYRQAPGKQRELVATMSRGGTINYADSVRGRFTISRDNAKSTVFLEMNSLKPEDTAVYYCTALLDSYYWGQGTQVTVSS

SEQ ID NO: 16 - protein, 114 aa, synthetic construct
  REGION 1..114: note = Synthetic
QVQLQESGGGLVQAGGSLRLSCAASGSIFSIRVMGWYRQAPGKQRELVATMSRGGTINYADSVRGRFTISRDNAKITVYLQMTSLKPEDTAVYYCAALLDSYYWGQGTQVTVSS

SEQ ID NO: 17 - protein, 131 aa, synthetic construct
  REGION 1..131: note = Synthetic
QVQLQESGGGLVQPGGSLRLSCTASGFTLDKYAVGWFRQAPGKEREGVSCISSIDDSTDYVDSVKGRFTISRDNAKNAVYLQMNSLKPEDTAVYDCMTIPLPYGSTCRIPSRSDLLAINYWGKGTLVTVSS

SEQ ID NO: 18 - protein, 120 aa, synthetic construct
  REGION 1..120: note = Synthetic
QVQLQESGGGLVQAGGSLRLSCQGSGRTFSTYAMGWYRQAPGKEREFVAAITRGGNTIYADSVKGRFTISRVSDKNTVYLQMSSLKPEDTAVYYCAADRIIVPRDPMDYWGKGTLVTVSS

SEQ ID NO: 19 - protein, 124 aa, synthetic construct
  REGION 1..124: note = Synthetic
QVQLQQSGGGLVQAGGSLRLSCTASGRTLSYWTMGWFRQAPGKEREFVAAINWSSGTRYSDSVRDRFTIDGDTDKTTVYLEMNKMNLDDSAVYYCAAHRASFGLGYQTHEYDFWGQGTQVTVSS

SEQ ID NO: 20 - protein, 124 aa, synthetic construct
  REGION 1..124: note = Synthetic
QVQLQESGGGLVQAGGSLRLTCTASGRTLSYWTMGWFRQAPGKEREFVAAINWSSGTRYSDSVKDRFTIDGDSDKTTVYLQMNSLNLDDSAVYYCAAHRASFGLGYQTHEYDFWGQGTQVTVSS

SEQ ID NO: 21 - protein, 126 aa, synthetic construct
  REGION 1..126: note = Synthetic
QVQLQESGGGLVQAGDSLRLSCLASGGTFSSYIMGWFRQAPGKDREFVGAISWSGGVTHYADSVKGRFTISRDNAKNTVYLQMNSLKPEDTAVYYCAADSRISAGGSYYEADFGSWGQGTQVTVSS

SEQ ID NO: 22 - protein, 122 aa, synthetic construct
  REGION 1..122: note = Synthetic
QVQLQESGGGLVQAGGSLRLTCAVSGRTFSAIHMGWFRQAPGKEREFVAGISWSGGGTAYGGTVKGRFTISRDNAKNTVSLQMNSLKSEDTAVYYCAASDTDWGRSASYDYWGQGTQVTVSA

SEQ ID NO: 23 - protein, 126 aa, synthetic construct
  REGION 1..126: note = Synthetic
QVQLQQSGGGLVQAGGSLRLSCAASGGTFSSYVMGWFRQAPGKDREFVGAISWSGGVTHYADSVKGRFTISRDNAKNTVYLQMNSLKPEDTAVYYCAADSRISAGGSYYEADFGSWGQGTQVTVSS

SEQ ID NO: 24 - protein, 120 aa, synthetic construct
  REGION 1..120: note = Synthetic
QVQLQQSGGGLVQAGDSLRLSCATSGRTFSSYTMGWFRQTPGKEREFVAAISWSGTYYTDSVKGRFTISRDTAKNTVYLQMNSLKPEDTAVYYCAVGSRRLYYSSDINYWGQGTQVTVSS

SEQ ID NO: 25 - protein, 120 aa, synthetic construct
  REGION 1..120: note = Synthetic
QVQLQESGGGLVQAGGSLRLSCATSGLTVSRYTMGWFRQTPGKDREFVAAISWSGTYYTDSVKGRFTISVDNAKNMVYLQMNSLKPEDTAVYYCAAGSRRLYYSNDINYWGQGTQVTVSS

SEQ ID NO: 26 - protein, 123 aa, synthetic construct
  REGION 1..123: note = Synthetic
QVQLQESGGGLVQAGGSLRLSCAASSRTFSNYAMAWFRQTPGKEREFLATINGDTTFTIYADSVKGRFTISRDNAKNTLYLQMNSLKAEDTAVYYCAARQWNPTMRERDYGYWGQGTEVTVSS

SEQ ID NO: 27 - protein, 126 aa, synthetic construct
  REGION 1..126: note = Synthetic
QVQLQESGGGLVQAGGSLRLSCAASGRVFENYFMGWFRQAPGKEREFVAATNWNTATNWNTYYAAFVKARFTISRDKAKNTLYLQMNSLKPEDTAVYYCAATGSRTYDVVDYYDYWGQGTQVTVSS

SEQ ID NO: 28 - protein, 124 aa, synthetic construct
  REGION 1..124: note = Synthetic
QVQLQESGGGLVQAGGSLRLSCAASGRTFSSYSMAWFRQAPGKERESVAAITYSGITTAYTDSVKGRFTIWRDNAKNTVYLQMNSLKPEDTAVYYCAASYSASRSYPFGEYDYWGQGTQVTVSS

SEQ ID NO: 29 - protein, 124 aa, synthetic construct
  REGION 1..124: note = Synthetic
QVQLQESGGGLVQAGGSLRLSCAASGRTFSSYSMAWFRQAPGKERESVAAITYSGISTAYTDSVKGRFTISRDNAKNTVYLYMNSLKPEDTAVYYCAASYSASRSYPFGEYDYWGQGTQVTVSS

SEQ ID NO: 30 - protein, 115 aa, synthetic construct
  REGION 1..115: note = Synthetic
QVQLQESGGGLVQPGGSLRLSCAASGFTFSNSAMSWMRQAPGKAVEWVSSINIGGDSRRYAESVAGRFTISRDNAKNTLYLQMNSLKPEDTAVYYCAKGLASTIRGQGTQVTVSS

SEQ ID NO: 31 - protein, 114 aa, synthetic construct
  REGION 1..114: note = Synthetic
QVQLQESGGGLVQPGGSLRLSCAASGFTFSNSAMSWMRQAPGKGVEWVSSIEVGGGRRYAESVAGRFTISRDNAKNTLYLQMNSLKPEDTAVYYCSKGLASTIRGQGTQVTVSS

SEQ ID NO: 32 - protein, 114 aa, synthetic construct
  REGION 1..114: note = Synthetic
QVQLQESGGGLVQPGGSLRLSCAASGFTFSNSAMSWMRQAPGKGVEWVSSIGIDGGRRYAEAVAGRFTISRDNAKNTLYLQMNSLKPEDTAVYYCAKGLASTIRGQGTQVTVSS

SEQ ID NO: 33 - protein, 115 aa, synthetic construct
  REGION 1..115: note = Synthetic
QVQLQESGGGLVQPGGSLRLSCAASGFTFSNSAMSWMRQAPGKGVEWVSSIGIGGGTTRYADSVAGRFTISRDNAKNTLYLQMNSLKPEDTAVYYCAKGLASTIRGQGTQVTVSS

SEQ ID NO: 34 - protein, 120 aa, synthetic construct
  REGION 1..120: note = Synthetic
QVQLQESGGGLVQAGDSLRLSCATSGRSFSSYTMGWFRQTPGKEREFVAAISWSGTYYTDSVKGRFTISRDNAKNTVYLQMNSLKPEDTAVYYCAVGSRRLYYSSDINYWGQGTQVTVSS

SEQ ID NO: 35 - protein, 120 aa, synthetic construct
  REGION 1..120: note = Synthetic
QVQLQESGGGLVQAGDSLRLSCATSGLTVSRYTMGWFRQTPGKEREFVAAISWSGTYYTDSVKGRFTISRDNAKNMVYLQMNSLKPEDTAVYYCAAGSRRLHYSSDINYWGQGTQVTVSS

SEQ ID NO: 36 - protein, 128 aa, synthetic construct
  REGION 1..128: note = Synthetic
QVQLQESGGGLVQAGESLRLSCLAAGRTFSTSTLGWFRQAPGLEREFVAAIRYTSDYTARTTDYADSVKGRFAISRDYIKQAVYLQMNNLKPEDTAVYYCAAAKYGMGYSDPSGYTYWGQGTQVTVSS

SEQ ID NO: 37 - protein, 123 aa, synthetic construct
  REGION 1..123: note = Synthetic
QVQLQESGGGLVQAGGSLRLSCAASSRTFSNYAMAWFRQTPGKEREFLAAITGDTAFTIYADSVKGRFTISRDNPKNTLYLQMNSLKAEDTAVYYCAARQWNPTMRERDYGYWGQGTEVTVSS

SEQ ID NO: 38 - protein, 127 aa, synthetic construct
  REGION 1..127: note = Synthetic
QVQLQESGGGLVQAGGSLRLSCAASGRRFRLYHMGWFRQAPGKEREFVAVISWSGGTTVYADSVKGRFTISRDNEKNAGYLQMNSLKPEDTAVYYCAVDRLIESFSDPTAWPRMDYWGKGALVTVSS

SEQ ID NO: 39 - protein, 115 aa, synthetic construct
  REGION 1..115: note = Synthetic
QVQLQESGGGLVQPGGSLRLSCAASGFTFSNSAMSWMRQAPGKGVEWVSSINIGGGTTSYADSVAGRFTISRDNAKNTLYLQMNSLKPEDTAVYYCAKGLASTIRGQGTQVTVSS

SEQ ID NO: 40 - protein, 115 aa, synthetic construct
  REGION 1..115: note = Synthetic
QVQLQESGGGLVQPGGSLRLSCAASGFTFSNSAMSWMRQAPGKGVEWVSSINIGGGTRRYAESVAGRFTISRDNAKNTLYLQMNSLKPEDTAVYYCAKGLASTIRGQGTQVTVSS

SEQ ID NO: 41 - protein, 127 aa, synthetic construct
  REGION 1..127: note = Synthetic
QVQLQESGGGLVQAGGSLRLSCAASGRKFRLYHMGWFRQAPGKEREFVAVISWSGGSTVYADSVKGRFTISRDNEKNAGYLQMNSLKPEDTAVYYCAVDRLIESFSDPTAWPRMDYWGKGALVTVSS

SEQ ID NO: 42 - protein, 114 aa, synthetic construct
  REGION 1..114: note = Synthetic
QVQLQQSGGGLVQPGGSLRLSCAASGFTFSNSAMSWMRQAPGKGVEWVSSINIGGGTRYADSVAGRFTIYRDNAKNTLYLQMNSLKSEDTAVYYCAKGLASTIRGQGTQVTVSS

SEQ ID NO: 43 - protein, 123 aa, synthetic construct
  REGION 1..123: note = Synthetic
QVQLQESGGGSVQAGGSLRLSCAASGRTFSSYDMGWFRQAPGKEREWVASISYNIYYADFVKGRFTISKDNAKNTVSLQMNSLKPEDTAVYYCAAVQRRGSYSYDRAQSYDYWGQGTQVTVSS

SEQ ID NO: 44 - protein, 114 aa, synthetic construct
  REGION 1..114: note = Synthetic
QVQLQESGGGLVQPGGSLRLSCAASGFTFSNSAMSWMRQAPGKGVEWVSSIEIGGTRRYAESVAGRFTISRDNAKNTLYLQMNSLKAEDTAVYYCAKGLASTIRGQGTQVTVSS

SEQ ID NO: 45 - protein, 115 aa, synthetic construct
  REGION 1..115: note = Synthetic
QVQLQESGGGLVQPGGSLRLSCAASGFTFSNSPMSWMRQAPGKGVEWVSSINIGAGTTRYAESVAGRFTIARDNAKNTLYLQMNSLKPEDTAVYYCAKGLASTIRGQGTQVIVSS

SEQ ID NO: 46 - protein, 115 aa, synthetic construct
  REGION 1..115: note = Synthetic
QVQLQESGGGLVQPGGSLRLSCAASGFTFSNSAMSWMRQAPGKGVEWVSSINIGGGDKRYAESVAGRFTISRDNAKNTLYLQMNSLKFEDTAVYYCAKGLASTIRGQGTQVTVSS

SEQ ID NO: 47 - protein, 114 aa, synthetic construct
  REGION 1..114: note = Synthetic
QVQLQESGGGLVQPGGSLRLSCAASGFTFSNSAMSWMRQAPGKGVEWVSSIETGGTKRYAESVAGRFTISRDNAKNTLNLQMNSLKPEDTAVYYCAKGLASTIRGQGTQVTVSS

SEQ ID NO: 48 - protein, 115 aa, synthetic construct
  REGION 1..115: note = Synthetic
QVQLQQSGGGLVQPGGSLRLSCAASGFTFSNSPMSWMRQAPGKGVEWVSSINIGEGTTRYAESVAGRFTISRDNVKNTLYLQMNSLKPEDTAVYYCAKGLASTIRGQGTQVTVSS

SEQ ID NO: 49 - protein, 115 aa, synthetic construct
  REGION 1..115: note = Synthetic
QVQLQESGGGLVQPGGSLRLSCAASGFTFSNSPMSWMRQAPGKGVEWVSSINIGGDTRRYAESVAGRFTISRDNAKNTLYLQMNSLKSEDTAVYYCAKGLASTIRGQGTQVTVSS

SEQ ID NO: 50 - protein, 114 aa, synthetic construct
  REGION 1..114: note = Synthetic
QVQLQESGGGLVQPGGSLRLSCAASGFTFSNSAMSWMRQAPGNGVEWVSSVNIDGGRRYAEAVAGRFTISRDNAKNTLYLQMNSLKPEDTAVYYCAKGLASTIRGQGTQVTVSS

SEQ ID NO: 51 - protein, 114 aa, synthetic construct
  REGION 1..114: note = Synthetic
QVQLQESGGGLVQPGGSLRLSCAASGFTFSNSAMAWMRQAPGKGVEWVSSISIDGGRRYAEAVAGRFTISRDNAKNTLYLQMNSLKPEDTAVYYCAKGLASTIRGQGTQVTVSS

SEQ ID NO: 52 - protein, 127 aa, synthetic construct
  REGION 1..127: note = Synthetic
QVQLQESGGGLVQAGGSLRLSCAASGGKFTLYHMGWFRQTPGKEREFVAVISWSGRSTVYADSVKGRFTISRDNDKNAGYLQMNSLKPEDTAIYYCAVDRLIEKFSDPTAWPRMDSWGRGTLVTVSS

SEQ ID NO: 53 - protein, 122 aa, synthetic construct
  REGION 1..122: note = Synthetic
QVQLQESGGGLVQAGDSLRLSCAASGRTASMGWFRQAPGTQREFVATITRSSIYTDYSDSVKGRFAISRDNAKNTVYLQMNSLKPEDTAVYYCAADSTMSGSSRYSSDYAYWGQGTQVTVSS

SEQ ID NO: 54 - protein, 114 aa, synthetic construct
  REGION 1..114: note = Synthetic
QVQLQESGGGLVQPGGSLRLSCAASGFTFSNSPMSWMRQAPGKGVEWVSSIDIGGNRRYAEAVAGRFTISRDNAKNTLYLQMNSLKPEDTAVYYCAKGLASTIRGQGTQVTVSS

SEQ ID NO: 55 - protein, 127 aa, synthetic construct
  REGION 1..127: note = Synthetic
QVQLQESGGGLVQAGGSLRLSCAVSGRRFTLYHMGWFRQRPGKEREFVAVISWSGGSTVYADSVKGRFTISRDNEKNAGYLQMNSLKPEDTAVYYCAVDRLIESFSDPTAWPRMDYWGKGALVTVSS

SEQ ID NO: 56 - protein, 127 aa, synthetic construct
  REGION 1..127: note = Synthetic
QVQLQQSGGGLVQAGGSLRLSCAASGRRFSLYHMGWFRQAPGKEREFVAVISWSGGTTVYADSVKGRFTISRDNEKNAGYLQMNSLKPEDTAVYYCAVDRLIESFSDPTAWPRMDYWGKGALVTVSS

SEQ ID NO: 57 - protein, 9 aa, synthetic construct
  REGION 1..9: note = Synthetic
QRASSLFAM

SEQ ID NO: 58 - protein, 9 aa, synthetic construct
  REGION 1..9: note = Synthetic
GSIFSISSA

SEQ ID NO: 59 - protein, 9 aa, synthetic construct
  REGION 1..9: note = Synthetic
GRTLSYWTM

SEQ ID NO: 60 - protein, 9 aa, synthetic construct
  REGION 1..9: note = Synthetic
GGTFSSYTM

SEQ ID NO: 61 - protein, 9 aa, synthetic construct
  REGION 1..9: note = Synthetic
GFTLDKYAV

SEQ ID NO: 62 - protein, 9 aa, synthetic construct
  REGION 1..9: note = Synthetic
GFTVPYYYI

SEQ ID NO: 63 - protein, 9 aa, synthetic construct
  REGION 1..9: note = Synthetic
GSTFNNYMI

SEQ ID NO: 64 - protein, 9 aa, synthetic construct
  REGION 1..9: note = Synthetic
GRTFSNADM

SEQ ID NO: 65 - protein, 9 aa, synthetic construct
  REGION 1..9: note = Synthetic
GRAFSTYGM

SEQ ID NO: 66 - protein, 9 aa, synthetic construct
  REGION 1..9: note = Synthetic
GGTFSSYIM

SEQ ID NO: 67 - protein, 9 aa, synthetic construct
  REGION 1..9: note = Synthetic
GSIMSIRVM

SEQ ID NO: 68 - protein, 9 aa, synthetic construct
  REGION 1..9: note = Synthetic
ASIISIRVM

SEQ ID NO: 69 - protein, 9 aa, synthetic construct
  REGION 1..9: note = Synthetic
GSIFSIRVM

SEQ ID NO: 70 - protein, 9 aa, synthetic construct
  REGION 1..9: note = Synthetic
GFTLDKYAV

SEQ ID NO: 71 - protein, 9 aa, synthetic construct
  REGION 1..9: note = Synthetic
GRTFSTYAM

SEQ ID NO: 72 - protein, 9 aa, synthetic construct
  REGION 1..9: note = Synthetic
GRTFSAIHM

SEQ ID NO: 73 - protein, 9 aa, synthetic construct
  REGION 1..9: note = Synthetic
GGTFSSYVM

SEQ ID NO: 74 - protein, 9 aa, synthetic construct
  REGION 1..9: note = Synthetic
GRTFSSYTM

SEQ ID NO: 75 - protein, 9 aa, synthetic construct
  REGION 1..9: note = Synthetic
GLTVSRYTM

SEQ ID NO: 76 - protein, 9 aa, synthetic construct
  REGION 1..9: note = Synthetic
SRTFSNYAM

SEQ ID NO: 77 - protein, 9 aa, synthetic construct
  REGION 1..9: note = Synthetic
GRVFENYFM

SEQ ID NO: 78 - protein, 9 aa, synthetic construct
  REGION 1..9: note = Synthetic
GRTFSSYSM

SEQ ID NO: 79 - protein, 9 aa, synthetic construct
  REGION 1..9: note = Synthetic
GRTFSSYSM

SEQ ID NO: 80 - protein, 9 aa, synthetic construct
  REGION 1..9: note = Synthetic
GFTFSNSAM

SEQ ID NO: 81 - protein, 9 aa, synthetic construct
  REGION 1..9: note = Synthetic
GFTFSNSAM

SEQ ID NO: 82 - protein, 9 aa, synthetic construct
  REGION 1..9: note = Synthetic
GFTFSNSAM

SEQ ID NO: 83 - protein, 9 aa, synthetic construct
  REGION 1..9: note = Synthetic
GFTFSNSAM

SEQ ID NO: 84 - protein, 9 aa, synthetic construct
  REGION 1..9: note = Synthetic
GRSFSSYTM

SEQ ID NO: 85 - protein, 9 aa, synthetic construct
  REGION 1..9: note = Synthetic
GLTVSRYTM

SEQ ID NO: 86 - protein, 9 aa, synthetic construct
  REGION 1..9: note = Synthetic
GRTFSTSTL

SEQ ID NO: 87 - protein, 9 aa, synthetic construct
  REGION 1..9: note = Synthetic
SRTFSNYAM

SEQ ID NO: 88 - protein, 9 aa, synthetic construct
  REGION 1..9: note = Synthetic
GRRFRLYHM

SEQ ID NO: 89 - protein, 9 aa, synthetic construct
  REGION 1..9: note = Synthetic
GFTFSNSAM

SEQ ID NO: 90 - protein, 9 aa, synthetic construct
  REGION 1..9: note = Synthetic
GFTFSNSAM

SEQ ID NO: 91 - protein, 9 aa, synthetic construct
  REGION 1..9: note = Synthetic
GRKFRLYHM

SEQ ID NO: 92 - protein, 9 aa, synthetic construct
  REGION 1..9: note = Synthetic
GFTFSNSAM

SEQ ID NO: 93 - protein, 9 aa, synthetic construct
  REGION 1..9: note = Synthetic
GRTFSSYDM

SEQ ID NO: 94 - protein, 9 aa, synthetic construct
  REGION 1..9: note = Synthetic
GFTFSNSAM

SEQ ID NO: 95 - protein, 9 aa, synthetic construct
  REGION 1..9: note = Synthetic
GFTFSNSPM

SEQ ID NO: 96 - protein, 9 aa, synthetic construct
  REGION 1..9: note = Synthetic
GFTFSNSAM

SEQ ID NO: 97 - protein, 9 aa, synthetic construct
  REGION 1..9: note = Synthetic
GFTFSNSAM

SEQ ID NO: 98 - protein, 9 aa, synthetic construct
  REGION 1..9: note = Synthetic
GFTFSNSPM

SEQ ID NO: 99 - protein, 9 aa, synthetic construct
  REGION 1..9: note = Synthetic
GFTFSNSPM

SEQ ID NO: 100 - protein, 9 aa, synthetic construct
  REGION 1..9: note = Synthetic
GFTFSNSAM

SEQ ID NO: 101 - protein, 9 aa, synthetic construct
  REGION 1..9: note = Synthetic
GFTFSNSAM

SEQ ID NO: 102 - protein, 9 aa, synthetic construct
  REGION 1..9: note = Synthetic
GGKFTLYHM

SEQ ID NO: 103 - protein, 6 aa, synthetic construct
  REGION 1..6: note = Synthetic
GRTASM

SEQ ID NO: 104 - protein, 9 aa, synthetic construct
  REGION 1..9: note = Synthetic
GFTFSNSPM

SEQ ID NO: 105 - protein, 9 aa, synthetic construct
  REGION 1..9: note = Synthetic
GRRFTLYHM

SEQ ID NO: 106 - protein, 9 aa, synthetic construct
  REGION 1..9: note = Synthetic
GRRFSLYHM

SEQ ID NO: 107 - protein, 8 aa, synthetic construct
  REGION 1..8: note = Synthetic
ISWNGDKS

SEQ ID NO: 108 - protein, 7 aa, synthetic construct
  REGION 1..7: note = Synthetic
IFSDGST

SEQ ID NO: 109 - protein, 7 aa, synthetic construct
  REGION 1..7: note = Synthetic
INWSSGT

SEQ ID NO: 110 - protein, 8 aa, synthetic construct
  REGION 1..8: note = Synthetic
ITWNSEVT

SEQ ID NO: 111 - protein, 8 aa, synthetic construct
  REGION 1..8: note = Synthetic
ISSIDDST

SEQ ID NO: 112 - protein, 8 aa, synthetic construct
  REGION 1..8: note = Synthetic
IASSSGKA

SEQ ID NO: 113 - protein, 8 aa, synthetic construct
  REGION 1..8: note = Synthetic
ISGSGAGT

SEQ ID NO: 114 - protein, 8 aa, synthetic construct
  REGION 1..8: note = Synthetic
ISWSGGRT

SEQ ID NO: 115 - protein, 8 aa, synthetic construct
  REGION 1..8: note = Synthetic
ISSSGAGS

SEQ ID NO: 116 - protein, 8 aa, synthetic construct
  REGION 1..8: note = Synthetic
ISWSGGVT

SEQ ID NO: 117 - protein, 7 aa, synthetic construct
  REGION 1..7: note = Synthetic
MSRGNTI

SEQ ID NO: 118 - protein, 7 aa, synthetic construct
  REGION 1..7: note = Synthetic
MSRGGTI

SEQ ID NO: 119 - protein, 7 aa, synthetic construct
  REGION 1..7: note = Synthetic
MSRGGTI

SEQ ID NO: 120 - protein, 8 aa, synthetic construct
  REGION 1..8: note = Synthetic
ISSIDDST

SEQ ID NO: 121 - protein, 7 aa, synthetic construct
  REGION 1..7: note = Synthetic
ITRGGNT

SEQ ID NO: 122 - protein, 8 aa, synthetic construct
  REGION 1..8: note = Synthetic
ISWSGGGT

SEQ ID NO: 123 - protein, 8 aa, synthetic construct
  REGION 1..8: note = Synthetic
ISWSGGVT

SEQ ID NO: 124 - protein, 6 aa, synthetic construct
  REGION 1..6: note = Synthetic
ISWSGT

SEQ ID NO: 125 - protein, 6 aa, synthetic construct
  REGION 1..6: note = Synthetic
ISWSGT

SEQ ID NO: 126 - protein, 8 aa, synthetic construct
  REGION 1..8: note = Synthetic
INGDTTFT

SEQ ID NO: 127 - protein, 11 aa, synthetic construct
  REGION 1..11: note = Synthetic
TNWNTATNWNT

SEQ ID NO: 128 - protein, 8 aa, synthetic construct
  REGION 1..8: note = Synthetic
ITYSGITT

SEQ ID NO: 129 - protein, 8 aa, synthetic construct
  REGION 1..8: note = Synthetic
ITYSGIST

SEQ ID NO: 130 - protein, 8 aa, synthetic construct
  REGION 1..8: note = Synthetic
INIGGDSR

SEQ ID NO: 131 - protein, 7 aa, synthetic construct
  REGION 1..7: note = Synthetic
IEVGGGR

SEQ ID NO: 132 - protein, 7 aa, synthetic construct
  REGION 1..7: note = Synthetic
IGIDGGR

SEQ ID NO: 133 - protein, 8 aa, synthetic construct
  REGION 1..8: note = Synthetic
IGIGGGTT

SEQ ID NO: 134 - protein, 6 aa, synthetic construct
  REGION 1..6: note = Synthetic
ISWSGT

SEQ ID NO: 135 - protein, 6 aa, synthetic construct
  REGION 1..6: note = Synthetic
ISWSGT

SEQ ID NO: 136 - protein, 12 aa, synthetic construct
  REGION 1..12: note = Synthetic
IRYTSDYTARTT

SEQ ID NO: 137 - protein, 8 aa, synthetic construct
  REGION 1..8: note = Synthetic
ITGDTAFT

SEQ ID NO: 138 - protein, 8 aa, synthetic construct
  REGION 1..8: note = Synthetic
ISWSGGTT

SEQ ID NO: 139 - protein, 8 aa, synthetic construct
  REGION 1..8: note = Synthetic
INIGGGTT

SEQ ID NO: 140 - protein, 8 aa, synthetic construct
  REGION 1..8: note = Synthetic
INIGGGTR

SEQ ID NO: 141 - protein, 8 aa, synthetic construct
  REGION 1..8: note = Synthetic
ISWSGGST

SEQ ID NO: 142 - protein, 7 aa, synthetic construct
  REGION 1..7: note = Synthetic
INIGGGT

SEQ ID NO: 143 - protein, 5 aa, synthetic construct
  REGION 1..5: note = Synthetic
ISYNI

SEQ ID NO: 144 - protein, 7 aa, synthetic construct
  REGION 1..7: note = Synthetic
IEIGGTR

SEQ ID NO: 145 - protein, 8 aa, synthetic construct
  REGION 1..8: note = Synthetic
INIGAGTT

SEQ ID NO: 146 - protein, 8 aa, synthetic construct
  REGION 1..8: note = Synthetic
INIGGGDK

SEQ ID NO: 147 - protein, 7 aa, synthetic construct
  REGION 1..7: note = Synthetic
IETGGTK

SEQ ID NO: 148 - protein, 8 aa, synthetic construct
  REGION 1..8: note = Synthetic
INIGEGTT

SEQ ID NO: 149 - protein, 8 aa, synthetic construct
  REGION 1..8: note = Synthetic
INIGGDTR

SEQ ID NO: 150 - protein, 7 aa, synthetic construct
  REGION 1..7: note = Synthetic
VNIDGGR

SEQ ID NO: 151 - protein, 7 aa, synthetic construct
  REGION 1..7: note = Synthetic
ISIDGGR

SEQ ID NO: 152 - protein, 8 aa, synthetic construct
  REGION 1..8: note = Synthetic
ISWSGRST

SEQ ID NO: 153 - protein, 8 aa, synthetic construct
  REGION 1..8: note = Synthetic
ITRSSIYT

SEQ ID NO: 154 - protein, 7 aa, synthetic construct
  REGION 1..7: note = Synthetic
IDIGGNR

SEQ ID NO: 155 - protein, 8 aa, synthetic construct
  REGION 1..8: note = Synthetic
ISWSGGST

SEQ ID NO: 156 - protein, 8 aa, synthetic construct
  REGION 1..8: note = Synthetic
ISWSGGTT

SEQ ID NO: 157 - protein, 18 aa, synthetic construct
  REGION 1..18: note = Synthetic
AAHRASFELGFATHDYDF

SEQ ID NO: 158 - protein, 5 aa, synthetic construct
  REGION 1..5: note = Synthetic
AVDGY

SEQ ID NO: 159 - protein, 18 aa, synthetic construct
  REGION 1..18: note = Synthetic
AAHRASFGLGYQTHEYDF

SEQ ID NO: 160 - protein, 11 aa, synthetic construct
  REGION 1..11: note = Synthetic
AAGRAGSGFTS

SEQ ID NO: 161 - protein, 24 aa, synthetic construct
  REGION 1..24: note = Synthetic
MTIPLPYGSTCDIPSRSDLLAINY

SEQ ID NO: 162 - protein, 19 aa, synthetic construct
  REGION 1..19: note = Synthetic
AALRKYGSTCYLHVLEYDY

SEQ ID NO: 163 - protein, 17 aa, synthetic construct
  REGION 1..17: note = Synthetic
ARRMSRSGIFGLRDYDS

SEQ ID NO: 164 - protein, 14 aa, synthetic construct
  REGION 1..14: note = Synthetic
AAGGYSNLPTSYGY

SEQ ID NO: 165 - protein, 15 aa, synthetic construct
  REGION 1..15: note = Synthetic
AASTTSWGKFAHYIY

SEQ ID NO: 166 - protein, 19 aa, synthetic construct
  REGION 1..19: note = Synthetic
AADSRISAGGSYYEADFGS

SEQ ID NO: 167 - protein, 8 aa, synthetic construct
  REGION 1..8: note = Synthetic
AALLDSYY

SEQ ID NO: 168 - protein, 8 aa, synthetic construct
  REGION 1..8: note = Synthetic
TALLDSYY

SEQ ID NO: 169 - protein, 8 aa, synthetic construct
  REGION 1..8: note = Synthetic
AALLDSYY

SEQ ID NO: 170 - protein, 24 aa, synthetic construct
  REGION 1..24: note = Synthetic
MTIPLPYGSTCRIPSRSDLLAINY

SEQ ID NO: 171 - protein, 14 aa, synthetic construct
  REGION 1..14: note = Synthetic
AADRIIVPRDPMDY

SEQ ID NO: 172 - protein, 15 aa, synthetic construct
  REGION 1..15: note = Synthetic
AASDTDWGRSASYDY

SEQ ID NO: 173 - protein, 19 aa, synthetic construct
  REGION 1..19: note = Synthetic
AADSRISAGGSYYEADFGS

SEQ ID NO: 174 - protein, 15 aa, synthetic construct
  REGION 1..15: note = Synthetic
AVGSRRLYYSSDINY

SEQ ID NO: 175 - protein, 15 aa, synthetic construct
  REGION 1..15: note = Synthetic
AAGSRRLYYSNDINY

SEQ ID NO: 176 - protein, 16 aa, synthetic construct
  REGION 1..16: note = Synthetic
AARQWNPTMRERDYGY

SEQ ID NO: 177 - protein, 16 aa, synthetic construct
  REGION 1..16: note = Synthetic
AATGSRTYDVVDYYDY

SEQ ID NO: 178 - protein, 17 aa, synthetic construct
  REGION 1..17: note = Synthetic
AASYSASRSYPFGEYDY

SEQ ID NO: 179 - protein, 17 aa, synthetic construct
  REGION 1..17: note = Synthetic
AASYSASRSYPFGEYDY

SEQ ID NO: 180 - protein, 8 aa, synthetic construct
  REGION 1..8: note = Synthetic
AKGLASTI

SEQ ID NO: 181 - protein, 8 aa, synthetic construct
  REGION 1..8: note = Synthetic
SKGLASTI

SEQ ID NO: 182 - protein, 8 aa, synthetic construct
  REGION 1..8: note = Synthetic
AKGLASTI

SEQ ID NO: 183 - protein, 8 aa, synthetic construct
  REGION 1..8: note = Synthetic
AKGLASTI

SEQ ID NO: 184 - protein, 15 aa, synthetic construct
  REGION 1..15: note = Synthetic
AVGSRRLYYSSDINY

SEQ ID NO: 185 - protein, 15 aa, synthetic construct
  REGION 1..15: note = Synthetic
AAGSRRLHYSSDINY

SEQ ID NO: 186 - protein, 17 aa, synthetic construct
  REGION 1..17: note = Synthetic
AAAKYGMGYSDPSGYTY

SEQ ID NO: 187 - protein, 16 aa, synthetic construct
  REGION 1..16: note = Synthetic
AARQWNPTMRERDYGY

SEQ ID NO: 188 - protein, 18 aa, synthetic construct
  REGION 1..18: note = Synthetic
AVDRLIESFSDPTAWPRM

SEQ ID NO: 189 - protein, 8 aa, synthetic construct
  REGION 1..8: note = Synthetic
AKGLASTI

SEQ ID NO: 190 - protein, 8 aa, synthetic construct
  REGION 1..8: note = Synthetic
AKGLASTI

SEQ ID NO: 191 - protein, 18 aa, synthetic construct
  REGION 1..18: note = Synthetic
AVDRLIESFSDPTAWPRM

SEQ ID NO: 192 - protein, 8 aa, synthetic construct
  REGION 1..8: note = Synthetic
AKGLASTI

SEQ ID NO: 193 - protein, 19 aa, synthetic construct
  REGION 1..19: note = Synthetic
AAVQRRGSYSYDRAQSYDY

SEQ ID NO: 194 - protein, 8 aa, synthetic construct
  REGION 1..8: note = Synthetic
AKGLASTI

SEQ ID NO: 195 - protein, 8 aa, synthetic construct
  REGION 1..8: note = Synthetic
AKGLASTI

SEQ ID NO: 196 - protein, 8 aa, synthetic construct
  REGION 1..8: note = Synthetic
AKGLASTI

SEQ ID NO: 197 - protein, 8 aa, synthetic construct
  REGION 1..8: note = Synthetic
AKGLASTI

SEQ ID NO: 198 - protein, 8 aa, synthetic construct
  REGION 1..8: note = Synthetic
AKGLASTI

SEQ ID NO: 199 - protein, 8 aa, synthetic construct
  REGION 1..8: note = Synthetic
AKGLASTI

SEQ ID NO: 200 - protein, 8 aa, synthetic construct
  REGION 1..8: note = Synthetic
AKGLASTI

SEQ ID NO: 201 - protein, 8 aa, synthetic construct
  REGION 1..8: note = Synthetic
AKGLASTI

SEQ ID NO: 202 - protein, 20 aa, synthetic construct
  REGION 1..20: note = Synthetic
AVDRLIEKFSDPTAWPRMDS

SEQ ID NO: 203 - protein, 18 aa, synthetic construct
  REGION 1..18: note = Synthetic
AADSTMSGSSRYSSDYAY

SEQ ID NO: 204 - protein, 8 aa, synthetic construct
  REGION 1..8: note = Synthetic
AKGLASTI

SEQ ID NO: 205 - protein, 20 aa, synthetic construct
  REGION 1..20: note = Synthetic
AVDRLIESFSDPTAWPRMDY

SEQ ID NO: 206 - protein, 20 aa, synthetic construct
  REGION 1..20: note = Synthetic
AVDRLIESFSDPTAWPRMDY

SEQ ID NO: 207 - protein, 322 aa, Clostridium perfringens
MKRLKIISITLVLTSVISTSLFSTQTQVFASELNDINKIELKNLSGEIIKENGKEAIKYTSSDTASHKGWKATLSGTFIEDPHSDKKTALLNLEGFIPSDKQIFGSKYYGKMKWPETYRINVKSADVNNNIKIANSIPKNTIDKKDVSNSIGYSIGGNISVEGKTAGAGINASYNVQNTISYEQPDFRTIQRKDDANLASWDIKFVETKDGYNIDSYHAIYGNQLFMKSRLYNNGDKNFTDDRDLSTLISGGFSPNMALALTAPKNAKESVIIVEYQRFDNDYILNWETTQWRGTNKLSSTSEYNEFMFKINWQDHKIEYYL

SEQ ID NO: 208 - protein, 398 aa, Clostridium perfringens
MKRKICKALICAALATSLWAGASTKVYAWDGKIDGTGTHAMIVTQGVSILENDLSKNEPESVRKNLEILKENMHELQLGSTYPDYDKNAYDLYQDHFWDPDTDNNFSKDNSWYLAYSIPDTGESQIRKFSALARYEWQRGNYKQATFYLGEAMHYFGDIDTPYHPANVTAVDSAGHVKFETFAEERKEQYKINTAGCKTNEDFYADILKNKDFNAWSKEYARGFAKTGKSIYYSHASMSHSWDDWDYAAKVTLANSQKGTAGYIYRFLHDVSEGNDPSVGKNVKELVAYISTSGEKDAGTDDYMYFGIKTKDGKTQEWEMDNPGNDFMTGSKDTYTFKLKDENLKIDDIQNMWIRKRKYTAFPDAYKPENIKIIANGKVVVDKDINEWISGNSTYNIK

SEQ ID NO: 209 - protein, 265 aa, Clostridium perfringens
MKKLIVKSTMMLLFSCLLCLGIQLPNTVKANEVNKYQSVMVQYLEAFKNYDIDTIVDISKDSRTVTKEEYKNMLMEFKYDPNQKLKSYEITGSRKIDNGEIFSVKTEFLNGAIYNMEFTVSYIDNKLMVSNMNRISIVNEGKCIPTPSFRTQVCTWDDELSQYIGDAVSFTRSSKFQYSSNTITLNFRQYATSGSRSLKVKYSVVDHWMWGDDIRASQWVYGENPDYARQIKLYLGSGETFKNYRIKVENYTPASIKVFGEGYCY

SEQ ID NO: 210 - protein, 696 aa, Clostridium perfringens
MKINKKIFSMLFMVIVLFTCISSNFSVSASSIQRGRDISNEVVTSLVATPNSINDGGNVQVRLEFKENHQRNIQSGDTITVKWTNSGEVFFEGYEKTIPLYIKDQNVGQAVIEKTGATLTFNDKIDKLDDVGGWATFTLQGRNITSGNHEHTGIAYIISGSKRADVNITKPESGTTSVFYYKTGSMYTNDTNHVNWWLLVNPSKVYSEKNVYIQDEIQGGQTLEPDSFEIVVTWYDGYVEKFKGKEAIREFHNKYPNSNISVSENKITVNISQEDSTQKFINIFYKTKITNPKQKEFVNNTKAWFKEYNKPAVNGESFNHSVQNINADAGVNGTVKGELKIIKTLKDKSIPIKDVQFKMRRVDNTVIKDGKKELLLTTDDKGIANVKGLPVGKYEVKEISAPEWIAFNPLIAPKLEFTISDQDTEGKLWAVENELKTISIPVEKVWVGQTSERAEIKLFADGIEVDKVILNADNNWKHTFENKPEYNSETKQKINYSVSETTISGYESNITGDAKNGFIVTNTELPDLTIGKEVIGELGDKTKVFNFELTLKQADGKPINGKFNYIGSVDDRYKKESIKPSDGEITFIEGKATITLSHGQEITIKDLPYGVTYKVMEKEANENGYLTTYNGNNEVTTGELKQDTKVQVVNNKEFVPTTGISTTTEQGTMVGMVIFSIGILMVMIVVLLQLNKGLKR

SEQ ID NO: 211 - protein, 302 aa, synthetic construct
  REGION 1..302: note = Synthetic
GRDISNEVVTSLVATPNSINDGGNVQVRLEFKENHQRNIQSGDTITVKWTNSGEVFFEGYEKTIPLYIKDQNVGQAVIEKTGATLTFNDKIDKLDDVGGWATFTLQGRNITSGNHEHTGIAYIISGSKRADVNITKPESGTTSVFYYKTGSMYTNDTNHVNWWLLVNPSKVYSEKNVYIQDEIQGGQTLEPDSFEIVVTWYDGYVEKFKGKEAIREFHNKYPNSNISVSENKITVNISQEDSTQKFINIFYKTKITNPKQKEFVNNTKAWFKEYNKPAVNGESFNHSVQNINADAGVNGTVK

SEQ ID NO: 212 - protein, 114 aa, synthetic construct
  REGION 1..114: note = Synthetic
QVQLQESGGGLVQAGGSLRLSCAASGSIFSIRVMGWYRQAPGKQRELVATMSRGGTINYADSVRGRFTISRDNAKSTVYLQMNSLKPEDTAVYYCAALLDSYYWGQGTQVTVSS

SEQ ID NO: 213 - protein, 114 aa, synthetic construct
  REGION 1..114: note = Synthetic
QVQLQESGGGLVQAGGSLRLSCVVSGSIMSIRVMGWYRQAPGKQRELVATMSRGNTINYADSVRGRFTISRDNAKSTVFLEMNSLKPEDTAVYYCAALLDSYYWGQGTQVTVSS

SEQ ID NO: 214 - protein, 114 aa, synthetic construct
  REGION 1..114: note = Synthetic
QVQLQESGGGLVQAGGSLRLSCAASASIISIRVMGWYRQAPGKQRELVATMSRGGTINYADSVRGRFTISRDNAKSTVYLQMNSLKPEDTDVYYCAALLDSYYWGQGTQVTVSS

SEQ ID NO: 215 - protein, 114 aa, synthetic construct
  REGION 1..114: note = Synthetic
QVQLQESGGGLVQAGGSLRLSCVVSGSIMSIRVMGWYRQAPGKQRELVATMSRGGTINYADSVRGRFTISRDNAKSTVYLQMNSLKPEDTAVYYCTALLDSYYWGQGTQVTVSS

SEQ ID NO: 216 - protein, 114 aa, synthetic construct
  REGION 1..114: note = Synthetic
QVQLQESGGGLVQAGGSLRLSCAASGSIFSIRVMGWYRQAPGKQRELVATMSRGGTINYADSVRGRFTISRDNAKSTVYLQMNSLKPEDTAVYYCTALLDSYYWGQGTQVTVSS

SEQ ID NO: 217 - protein, 114 aa, synthetic construct
  REGION 1..114: note = Synthetic
QVQLQESGGGLVQAGGSLRLSCVVSGSIMSIRVMGWYRQAPGKQRELVATMSRGGTINYADSVRGRFTISRDNAKNTVYLQMTSLKPEDTAVYYCTALLDSYYWGQGTQVTVSS

SEQ ID NO: 218 - protein, 114 aa, synthetic construct
  REGION 1..114: note = Synthetic
QVQLQESGGGLVQAGGSLRLSCAASGSIFSIRVMGWYRQAPGKQRELVATMSRGGTINYADSVRGRFTISRDNAKSTVYLQMNSLKPEDTDVYYCAALLDSYYWGQGTQVTVSS

SEQ ID NO: 219 - protein, 114 aa, synthetic construct
  REGION 1..114: note = Synthetic
QVQLQESGGGLVQAGGSLRLSCVVSGSIMSIRVMGWYRQAPGKQRELVATMSRGNTINYADSVRGRFTISRDNAKNTVYLQMTSLKPEDTAVYYCAALLDSYYWGQGTQVTVSS

SEQ ID NO: 220 - protein, 114 aa, synthetic construct
  REGION 1..114: note = Synthetic
QVQLQESGGGLVQAGGSLRLSCAASASIFSIRVMGWYRQAPGKQRELVATMSRGNTINYADSVRGRFTISRDNAKSTVYLQMTSLKPEDTAVYYCAALLDSYYWGQGTQVTVSS

SEQ ID NO: 221 - protein, 114 aa, synthetic construct
  REGION 1..114: note = Synthetic
QVQLQESGGGLVQAGGSLRLSCVVSGSIMSIRVMGWYRQAPGKQRELVATMSRGGTINYADSVRGRFTISRDNAKSTVYLQMNSLKPEDTAVYYCAALLDSYYWGQGTQVTVSS

SEQ ID NO: 222 - protein, 114 aa, synthetic construct
  REGION 1..114: note = Synthetic
QVQLQESGGGLVQAGGSLRLSCAASASIISIRVMGWYRQAPGKQRELVATMSRGGTINYADSVRGRFTISRDNAKSTVYLQMNSLKPEDTAVYYCTALLDSYYWGQGTQVTVSS

SEQ ID NO: 223 - protein, 114 aa, synthetic construct
  REGION 1..114: note = Synthetic
QVQLQESGGGLVQAGGSLRLSCAASASIISIRVMGWYRQAPGKQRELVATMSRGGTINYADSVRGRFTISRDNAKSTVYLQMNSLKPEDTAVYYCAALLDSYYWGQGTQVTVSS

SEQ ID NO: 224 - protein, 114 aa, synthetic construct
  REGION 1..114: note = Synthetic
QVQLQESGGGLVQAGGSLRLSCAASASIMSIRVMGWYRQAPGKQRELVATMSRGNTINYADSVRGRFTISRDNAKSTVFLEMNSLKPEDTAVYYCAALLDSYYWGQGTQVTVSS

SEQ ID NO: 225 - protein, 114 aa, synthetic construct
  REGION 1..114: note = Synthetic
QVQLQESGGGLVQAGGSLRLSCAASASIMSIRVMGWYRQAPGKQRELVATMSRGGTINYADSVRGRFTISRDNAKSTVYLQMNSLKPEDTDVYYCAALLDSYYWGQGTQVTVSS

SEQ ID NO: 226 - protein, 114 aa, synthetic construct
  REGION 1..114: note = Synthetic
QVQLQESGGGLVQAGGSLRLSCVVSGSIMSIRVMGWYRQAPGKQRELVATMSRGGTINYADSVRGRFTISRDNAKSTVYLQMNSLKPEDTDVYYCAALLDSYYWGQGTQVTVSS

SEQ ID NO: 227 - protein, 114 aa, synthetic construct
  REGION 1..114: note = Synthetic
QVQLQESGGGLVQAGGSLRLSCAASASIISIRVMGWYRQAPGKQRELVATMSRGGTINYADSVRGRFTISRDNAKSTVYLQMTSLKPEDTAVYYCAALLDSYYWGQGTQVTVSS

SEQ ID NO: 228 - protein, 114 aa, synthetic construct
  REGION 1..114: note = Synthetic
QVQLQESGGGLVQAGGSLRLSCVVSGSIMSIRVMGWYRQAPGKQRELVATMSRGNTINYADSVKGRFTISRDNAKSTVFLQMNSLKPEDTDVYYCAALLDSYYWGQGTQVTVSS

SEQ ID NO: 229 - protein, 114 aa, synthetic construct
  REGION 1..114: note = Synthetic
QVQLQESGGGLVQAGGSLRLSCAASASIMSIRVMGWYRQAPGKQRELVATMSRGNTINYADSVRGRFTISRDNAKSTVYLQMNSLKPEDTAVYYCAALLDSYYWGQGTQVTVSS

SEQ ID NO: 230 - protein, 114 aa, synthetic construct
  REGION 1..114: note = Synthetic
QVQLQESGGGLVQAGGSLRLSCVVSGSIMSIRVMGWYRQAPGKQRELVATMSRGNTINYADSVRGRFTISRDNAKSTVYLQMNSLKPEDTAVYYCAALLDSYYWGQGTQVTVSS

SEQ ID NO: 231 - protein, 114 aa, synthetic construct
  REGION 1..114: note = Synthetic
QVQLQESGGGLVQAGGSLRLSCVVSGSIISIRVMGWYRQAPGKQRELVATMSRGGTINYADSVRGRFTISRDNAKSTVFLEMNSLKPEDTAVYYCAALLDSYYWGQGTQVTVSS

SEQ ID NO: 232 - protein, 114 aa, synthetic construct
  REGION 1..114: note = Synthetic
QVQLQESGGGLVQAGGSLRLSCAASASIISIRVMGWYRQAPGKQRELVATMSRGNTINYADSVRGRFTISRDDAKNTVYLQMNSLRPDDTAVYYCAALLDSYYWGQGTQVTVSS

SEQ ID NO: 233 - protein, 123 aa, synthetic construct
  REGION 1..123: note = Synthetic
QVQLQESGGGLVQAGGSLRLSCAASGSIFSINVMGWYRQAPGKQRDLVALITSGGSTTYADSVKGRFTISRDNAKNTVYLQMNSLKPEDTAVYYCNAAQSRTSWLFPDEYDYWGQGTQVTVSS

SEQ ID NO: 234 - protein, 126 aa, synthetic construct
  REGION 1..126: note = Synthetic
QVQLQESGGGLVQAGGSLRLSCAASGRTFSIYAMGWFRQAPGKEREFVAVINRGGGTTTYADSVKGRFTISRDNTKNTVSLQMNSLKPDDTAVYYCAADRVTDTYYYLNPESYDYWGQGTQVTVSS

SEQ ID NO: 235 - protein, 116 aa, synthetic construct
  REGION 1..116: note = Synthetic
QVQLQESGGGLVQAGGSLRLSCAASGSGRRVGYMAWYRQTPGKQRESVATISRAGATKYADSVKDRFTISRDNAKDTVYLQMNSLKPDDTAVYYCFASLIDAGTYWGQGTQVTVSS

SEQ ID NO: 236 - protein, 126 aa, synthetic construct
  REGION 1..126: note = Synthetic
QVQLQESGGGLVQAGGSLRLSCAASGRTFSIYAMGWFRQAPGKEREFVAVINRSGGTTTYADSVKGRFTISRDNTKNTVSLQMNSLKPDDTAVYYCAADRVTDTYYYLNPESYDYWGQGTQVTVSS

SEQ ID NO: 237 - protein, 111 aa, synthetic construct
  REGION 1..111: note = Synthetic
QVQLQESGGGLVQAGGSLRLSCAASGMSFSLGTIYWYRQAPGKQREFVAFITNADTTMYANSVKGRFTISRDNGKNTVFLLMNNLKPEDSAVYYCNTATSWGQGTQVTVSS

SEQ ID NO: 238 - protein, 116 aa, synthetic construct
  REGION 1..116: note = Synthetic
QVQLQESGGGLVQAGGSLRVSCAASGSGRRVGYMAWYRQTPGKQRELVATISRAGATNYADSVKDRFTISRDNAKNTVYLQMNSLKPDDTAVYYCFASVFDAGTYWGQGTQVTVSS

SEQ ID NO: 239 - protein, 116 aa, synthetic construct
  REGION 1..116: note = Synthetic
QVQLQESGGGLVQAGGSLRLSCAASGSGRRVGYMAWYRQTPGKQRELVATISRAGATNYADSVKDRFTISRDNAKNTVYLQMNSLKPDDTAVYYCFASIFDAGTYWGQGTQVTVSS

SEQ ID NO: 240 - protein, 116 aa, synthetic construct
  REGION 1..116: note = Synthetic
QVQLQESGGGLVQAGGSLRLSCVASGSGSRINYMAWHRQTPGRQRELVAVINRTGAANYARSVKDRFTISRDNAKNTVYLQMNDLKPDDTAIYYCFASYLGAGAYWGQGTQVTVSS

SEQ ID NO: 241 - protein, 118 aa, synthetic construct
  REGION 1..118: note = Synthetic
QVQLQESGGGLVQAGGSLRLSCAASGRTFSTYTVGWFRQAPGKEREFVASITWNGGTILYADSVKGRFTISRDNAKNTVLLQMNSLKPEDTAVYYCVMGAAGQGWRYWGQGTQVTVSS

SEQ ID NO: 242 - protein, 116 aa, synthetic construct
  REGION 1..116: note = Synthetic
QVQLQESGGGLVQAGGSLRLSCVASGSGSRINYMAWHRQTPGRQRELVAVINRTGAAKYADSVKDRFTVSRDNAENTVYLQMNDLKPDDTAVYYCWASYLGAGTYWGQGIQVTVSS

SEQ ID NO: 243 - protein, 112 aa, synthetic construct
  REGION 1..112: note = Synthetic
QVQLQESGGGLVQPGGSLRLSCAASGFTFSRNYMSWVRQAPGKGLEWVGSIYSDDSTNYAPSVKGRFTISRDNAANTLYLQMNSLKSEDTAVYYCSKEGGLRGQGTQVTVSS

SEQ ID NO: 244 - protein, 116 aa, synthetic construct
  REGION 1..116: note = Synthetic
QVQLQQSGGGLVQAGGSLRLSCAASGSGRRVGYMAWYRQTPGKQRELVATISRAGATNYADSVKDRFTISRDNAKNTVYLQMNSLKPDDTAVYYCFASVFDAGTYWGQGTQVTVSS

SEQ ID NO: 245 - protein, 116 aa, synthetic construct
  REGION 1..116: note = Synthetic
QVQLQESGGGLVQAGGSLRLSCAASGSGRRVGYMAWYRQTPGKQRELVATISRAGATNYADSVKDRFTISRDNAKNTVYLQMNSLKPDDTAVYYCFASLFDAGTYWGQGTQVTVSS

SEQ ID NO: 246 - protein, 123 aa, synthetic construct
  REGION 1..123: note = Synthetic
QVQLQESGGGLVQAGGSLRLSCAASGRTFSGRTMAWFRQAPGKEREFVAAITWSGGTTYYPDSVKGRFTISRDIPKNTLYLQMNSLKSEDTAVYYCASDGPWRATTPDAYDYWGQGTQVTVSS

SEQ ID NO: 247 - protein, 111 aa, synthetic construct
  REGION 1..111: note = Synthetic
QVQLQESGGGLVQAGGSLRLSCAASGSIGTIDSMGWYREAPGKRRELVAFIMFSGRTIYQDSVKGRFSISGDNAKKTVSLQMTSLKPEDTGVYYCYSNQYWGQGTQVTVSS

SEQ ID NO: 248 - protein, 118 aa, synthetic construct
  REGION 1..118: note = Synthetic
QVQLQQSGGGLVQPGGSLRLSCAASEFSLLFGTIGWFRQAPGKEREGVSCVSSSDGSTYYADSVKGRFTISRDKAKNTWYLQMHSLKPEDTAVYYCATRCTVVPGITWGQGTQVTVSS

SEQ ID NO: 249 - protein, 112 aa, synthetic construct
  REGION 1..112: note = Synthetic
QVQLQESGGGVVQAGGSLRLSCVAPGSITRVGGMGWYRQPPGKERELVALINEVGNTNYGDSVKGRFTISRDNAKKTVYLEMNSLKPEDTAVYYCWIPPIPWGQGTQVTVSS

SEQ ID NO: 250 - protein, 118 aa, synthetic construct
  REGION 1..118: note = Synthetic
QVQLQESGGGLVQPGGSLRLSCATSPFSLRLGVVGWFRQAPGREREGVSCISSSEGSTHYADSVKGRFTISRDNAKNTVYLQMNSLKPEDTAVYYCATRCTVVPGITWGQGTQVTVSS

SEQ ID NO: 251 - protein, 127 aa, synthetic construct
  REGION 1..127: note = Synthetic
QVQLQESGGGLVQAGDSLRLSCAASARTSSSRAMGWFRQTPVREREFVAAISWSGGRTAYADSVKGRFTLSKYDKDTVSLTMNSLKPEDTAVYYCAARRSDFTGDYAYSGRSAYDYWGQGTQVTVSS

SEQ ID NO: 252 - protein, 115 aa, synthetic construct
  REGION 1..115: note = Synthetic
QVQLQESGGGSVQAGGSLRLSCAASGSTFIFDKMDWYRQTPEKSRELVATLMSRGDPYYLDSVKGRFTITRDNAKNTVYLQMNSLKPEDTAVYVCRGRAGERVYWGQGTQVTVSS

SEQ ID NO: 253 - protein, 125 aa, synthetic construct
  REGION 1..125: note = Synthetic
QVQLQESGGGLVQPGGSLRLSCAASGRTFSGVIVGWFRQAPGKEREFLATTLWSGGSTYYTDSVKGRFTISRDVAKNMVYLQMNSLKPEDAAIYYCAAKYGGSLSYMHPTGYTYWGQGTQVTVSS

SEQ ID NO: 254 - protein, 123 aa, synthetic construct
  REGION 1..123: note = Synthetic
QVQLQESGGGLVQAGGSLRLSCAASRIVFTISTMAWFRQAPGKEREFVASINRSGALTSHANSVKGRFTISRDAAKNTVYLQMNSLKDEDTAIYYCAASKANMPALPANYDYWGQGTQVTVSS

SEQ ID NO: 255 - protein, 112 aa, synthetic construct
  REGION 1..112: note = Synthetic
QVQLQESGGGVVQAGGSLRLSCVAPGSITRLGSMGWYRQPPGKQRELVALITAVGNTNYGDSVKGRFTISRDNAKKMVYLEMNSLKPEDTAVYYCWIPPIPWGQGTQVTVSS

SEQ ID NO: 256 - protein, 112 aa, synthetic construct
  REGION 1..112: note = Synthetic
QVQLQESGGGVVQAGGSLRLSCVAPGSITRLGGMGWYRQTPGKQRELVALIDTVGNTNYGESVKGRFTISRDNAKKMVYLEMNSLKPEDTAVYYCWIPPIPWGQGTQVTVSS

SEQ ID NO: 257 - protein, 123 aa, synthetic construct
  REGION 1..123: note = Synthetic
QVQLQESGGGLVQAGDSLTLSCVASERAFMYNMAWFRQAPGKERDFVAVRNWNVERTNYADFAKGRFTISRDAAKKVMYLKMNNLKPEDTAVYYCATTRVWPTQHQMGQIEYWGQGTQVTVSS

SEQ ID NO: 258 - protein, 115 aa, synthetic construct
  REGION 1..115: note = Synthetic
QVQLQESGGGLVQAGGSLRLSCAASSSFNTMGWYRQAPGKQRELVAGITSGGTIKYGDSVKGRFTISGDNAKNTVYLQMDSLKPEDTAVYYCVADWQYGSTWNYWGQGTQVTVSS

SEQ ID NO: 259 - protein, 124 aa, synthetic construct
  REGION 1..124: note = Synthetic
QVQLQESGGGLVQAGDSLRLSCAASGRNFDYYSMGWFRQAPGNERIFVAAINWRGAVIDYPDSVKGRFTISRDNAKNRVYLQMNSLKPEDTAVYYCAAASSSSRLLEPIGYNYWGQGTQVTVSS

SEQ ID NO: 260 - protein, 120 aa, synthetic construct
  REGION 1..120: note = Synthetic
QVQLQESGGGLVQAGGSLRLSCAASGSMFSINDMTWYRQAPGKQREMVATISSGGTTDYTESVKGRFFVIRDNAKITVYLQMNKLRPEDSGVYYCAGNLKRSETSYYWKTGQGIQVTVSS

SEQ ID NO: 261 - protein, 122 aa, synthetic construct
  REGION 1..122: note = Synthetic
QVQLQESGGGLVQTGGSLKLSCATSGRTFSRYHMGWFRQAPGKEREFVAAISLSGGGTAFANFVEGRFTISRDNAKNTLYLQMNSLKPEDTAVYYCTADRHEWGRLMKGDYWGQGTQVTVSS

SEQ ID NO: 262 - protein, 127 aa, synthetic construct
  REGION 1..127: note = Synthetic
QVQLQESGGGSVQAGGSLTVSCSASGRTSNSYNMAWFRQGPGKERELVAAISWTGGFTSYTNSVKDRFTISRENAKNTVYLQMNSLKPEDTAVYYCAATSRSLTSAMTREIRAYDYWGQGTQVTVSS

SEQ ID NO: 263 - protein, 115 aa, synthetic construct
  REGION 1..115: note = Synthetic
QVQLQESGGGLVQAGGSLRLSCAASGSTFSFNKMDWYRQAPEKQRELVATFMNDGNTYYVDSVKGRFTISRDNAKNTVYLQMNSLKFEDTAVYYCRGRAGMEVYWGQGTQVTVSS

SEQ ID NO: 264 - protein, 117 aa, synthetic construct
  REGION 1..117: note = Synthetic
QVQLQESGGGLVQPGGSLTLSCATSPLTLRLGPIGWFRQAPGKEREGVSCISSRDDKNYAESVKGRFTISRDNAKNMVYLQMNSLKPEDTAVYYCATRCTVVPGISWGQGTQVTVSS

SEQ ID NO: 265 - protein, 123 aa, synthetic construct
  REGION 1..123: note = Synthetic
QVQLQESGGGLVQAGDSLRLSCAASGRNFGYYTMGWFRQAPGNERIFVAAITWRGVIHHADSVKGRFTISRDNAKNTVYLQMNSLKPEDTAVYYCAAASSSSRPLEPIGYNYWGQGTQVTVSS

SEQ ID NO: 266 - protein, 126 aa, synthetic construct
  REGION 1..126: note = Synthetic
QVQLQESGGGLVQAGGSLRLSCTASGDIFSAAGMAWFRQTPGKERDLVAYVTWDGGTTRYKDSVKGRFTISRDNAKNTVLLQMNSLKPEDTAVYYCAAGNTGPFNLLHSSAQYAYWGQGTQVTVSS

SEQ ID NO: 267 - protein, 117 aa, synthetic construct
  REGION 1..117: note = Synthetic
QVQLQESGGGLVQAGGSLRLSCATSPLTLRLGAIGWFRQAPGKEREMVSCITSTEDKNYADSVKGRFTISRDNAKTMVYLQMNSLKLEDTAVYYCATRCTVVPGISWGQGTQVTVSS

SEQ ID NO: 268 - protein, 112 aa, synthetic construct
  REGION 1..112: note = Synthetic
QVQLQESGGGVVQAGGSLRLSCVAPGSITRIGGMGWYRQPPGKQRELVALINTVGNTNYGDSVKGRFTISRDNAKKTVYLEMNSLKPEDTAVYYCWIPPLPWGQGTQVTVSS

SEQ ID NO: 269 - protein, 119 aa, synthetic construct
  REGION 1..119: note = Synthetic
QVQLQQSGGGLVQAGGSLRLSCTASGRSFSRYIMGWFRQAPGKERESVARIAPSGGSAYYADSVKGRFTISRDNAKNTVYLQMNNLKSEDTAVYHCAARYDMDYEYKTWGPGTQVTVSS

SEQ ID NO: 270 - protein, 116 aa, synthetic construct
  REGION 1..116: note = Synthetic
QVQLQESGGGLVQAGGSLRLSCVASGSGSRIGFMAWHRQTPGRQRELVAVINRTGATRYADSVKDRFTISRDNAKNTVYLQMNDLKPDDTALYYCFASVVDAGTYWGQGTQVTVSS

SEQ ID NO: 271 - protein, 127 aa, synthetic construct
  REGION 1..127: note = Synthetic
QVQLQESGGGLVQPGGSLRVSCAASGLTFSDYAMGWFRQAPGQEREFVARISLTAASTLYADSVRGRFTISRDNAKNTVYLQMNSLRPDDTAVYYCAAQGRILRGRGLFKASDYDYWGQGTQVTVSS

SEQ ID NO: 272 - protein, 116 aa, synthetic construct
  REGION 1..116: note = Synthetic
QVQLQQSGGGSVQTGGSLALSCAASGTISIFDPMGWYRQAPGKQRELVASISEGSTNYANSVKGRFTISRDNAKKTVSLQMNSLEPADTAVYYCRLSRYYNSNIYWGQGTQVTVSS

SEQ ID NO: 273 - protein, 119 aa, synthetic construct
  REGION 1..119: note = Synthetic
QVQLQESGGGLVQAGGSLRLSCAASRNIYGINVIAWYRQAPGKQREMVARSANGGTTRYADSVKGRFTISRDNVKNIVYLQMSSLKPEDTAAYYCKAELYTLQHNYEYWGQGTQVTVSS

SEQ ID NO: 274 - protein, 116 aa, synthetic construct
  REGION 1..116: note = Synthetic
QVQLQESGGGSVQTGGSLALSCVASGTLSLFDPMGWYRQAPGKQRELVASISGLSTNYANSVKGRFTISRDDAKKTVSLQMNSLEPADTAVYYCHLSRYYNSNIYWGQGTQVTVSS

SEQ ID NO: 275 - protein, 120 aa, synthetic construct
  REGION 1..120: note = Synthetic
QVQLQESGGGLVQAGGSLRLSCAASGRVLSINAMGWYRQAPGKRREMVARITNGGSTNYAGSVKGRFTISRENTKNTMYLQMNSLKPEDTAVYYCLAEERPYYGGPLEYWGQGTQVTVSQ

SEQ ID NO: 276 - protein, 116 aa, synthetic construct
  REGION 1..116: note = Synthetic
QVQLQESGGGLVQAGGSLRLSCAASRTTFRVGTMAWFRQDPGKQRELVAGITSGGSTNYADSVKGRFTISRDNAKNTIYLQMNSLKPEDTGIYVCFANIVDRPVSWGQGTQVTVSS

SEQ ID NO: 277 - protein, 116 aa, synthetic construct
  REGION 1..116: note = Synthetic
QVQLQQSGGGAVQAGGSLTLSCVASGSGSRIGLMAWYRQTPGRQRELVAVIKGTGTTRYADSVKDRFTISRDNAKNTMYLQMNDLKPDDTALYYCFASVLGAGTYWGQGTQVTVSS

SEQ ID NO: 278 - protein, 116 aa, synthetic construct
  REGION 1..116: note = Synthetic
QVQLQESGGGSVQTGGSLALSCAASGTISLFDSMGWYRQAPGKQRELVASITEGSTNYANSVKGRFTISRDNAKKTVSLQMNSLEPADTAVYYCRLSRYYNSNIYWGQGTQVTVSS

SEQ ID NO: 279 - protein, 114 aa, synthetic construct
  REGION 1..114: note = Synthetic
QVQLQQSGGGLVQSGGSLRLSCAASETSLNFDDMRWYRQTPGKRREWVAIINTFPAGTTASYADSVKGRFTISKVNGENTVHLQMNRLKPEDTAVYYCNAGDYWGQGTQVTVSS

SEQ ID NO: 280 - protein, 116 aa, synthetic construct
  REGION 1..116: note = Synthetic
QVQLQESGGGLVQAGGSLRLSCTASGSDSSINYMGWYRQAPGKQRVLLAAISRDGRSNYADSVRGRFTISRDNAKNTVDLQMNSLKPEDTAVYYCYVDPLGRVPRWGQGTQVTVSS

SEQ ID NO: 281 - protein, 113 aa, synthetic construct
  REGION 1..113: note = Synthetic
QVQLQESGGGAVQAGGSLTLSCVASGTVNLMAWYRQTPGRQRELVAVIKGTGTTRYADSVKDRFTISRDNAKNTMYLQMNDLKPDDTALYYCFASVLGAGTYWGQGTQVTVSS

SEQ ID NO: 282 - protein, 113 aa, synthetic construct
  REGION 1..113: note = Synthetic
QVQLQESGGGLVQAGGSLRLSCAASGSIFSRNIILWHRQAPGKQRELVGGINTGGRTNYESSVKGRFTISRDNAKNTVYLQMDRLKPEDTAVYYCNAPSLGYWGQGTQVTVSS

SEQ ID NO: 283 - protein, 115 aa, synthetic construct
  REGION 1..115: note = Synthetic
QVQLQQSGGGLVQAGGSLRLSCVASGSGSINYMAWHRQTPGRQRELVAVINRTGAARYADSVKDRFTISRDNAENTMYLQMNDLKPDDTAVYYCFASALGAGVYWGQGTQVTVSS

SEQ ID NO: 284 - protein, 116 aa, synthetic construct
  REGION 1..116: note = Synthetic
QVQLQESGGGLVQPGGSLRLSCAASGSGWRVGYMAWYRQTPGKQRELVATISRAGATRYEDSVKDRFTISRDNAKNTVYLQMNSLKPDDTAVYYCFASIIDAGTYWGQGTPVTVSS

SEQ ID NO: 285 - protein, 123 aa, synthetic construct
  REGION 1..123: note = Synthetic
QVQLQESGGGLVQAGGSLRLSCTASGENFSTYVMGWFRQAPGKEREFVAAHNWRGGGTYYADSVKGRFTISRDHAKNTVYLEMNSLKPEDTAVYYCAARSGGSYTYTGSYHYWGQGTQVTVSS

SEQ ID NO: 286 - protein, 123 aa, synthetic construct
  REGION 1..123: note = Synthetic
QVQLQESGGGLVQAGDSLRLSCAAAGRTFSSYAMGWFRQAPGKEREFVATISRSGGSTYYADSVKGRFTISRDNAKNTVYLQMNSLKPEDTAVYYCAANRYGSSSYQGQYASWGQGTQVTVSS

SEQ ID NO: 287 - protein, 123 aa, synthetic construct
  REGION 1..123: note = Synthetic
QVQLQESGGGLVQAGGSLRLSCAASGRTFSSYHMGWFRQAPGKEREFVATISRSGGFTSYADSVKGRFTISRDNAKNTVWLQMNSLKPEDTAVYYCAAQQWPDPRNPNGYDYWGQGTQVTVSS

SEQ ID NO: 288 - protein, 123 aa, synthetic construct
  REGION 1..123: note = Synthetic
QVQLQESGGGLVQAGGSLRLACAASGRTFINYGMAWFRQSPGKEREFVAAVSISGAGTAYVEPVKDRFTISRDNTKNTLYLQMNTLKPEDTALYYCAAAKAGHWGRDANYDYWGQGTQVTVSS

SEQ ID NO: 289 - protein, 123 aa, synthetic construct
  REGION 1..123: note = Synthetic
QVQLQQSGGGLVQAGGSLRLSCSASGRTLTAYGMAWFRQSPGKEREFVAAVSLSGASTAYVEPVKDRFTISRDNTQNTVYLQMNSLKPEDTALYYCAAAKAGQWGRDAKYDYWGQGTQVTVSS

SEQ ID NO: 290 - protein, 128 aa, synthetic construct
  REGION 1..128: note = Synthetic
QVQLQQSGGGLVQAGGSLRLSCAASGRTFSTYAMGWFRQAPGKEREFVAGISWSGGRISYTDSVKGRFTISRDNAKNTVYLQMNSLKPEDTAVYYCTADLKGLWALGLPGHYASWDSWGQGTQVTVSS

SEQ ID NO: 291 - protein, 115 aa, synthetic construct
  REGION 1..115: note = Synthetic
QVQLQESGGGLVQPGGSLRLSCAASGSIGSINIMDWYRQAPGKQRDLVATFTSGGSTVYADSVKGRFTISRDNAKDTVYLQMNSLKPEDTAVYYCRARRGWAIYWGQGTQVTVSS

SEQ ID NO: 292 - protein, 123 aa, synthetic construct
  REGION 1..123: note = Synthetic
QVQLQQSGGGLVQAGDSLRLSCAASGRTFSSYGMGWFRQATGKEREFVAGISRTGSGTAYADSVKSRFTISRDNAKNTVYLQMNSLKAEDTAVYYCAADSGGSWGRGTTYDYWGQGTQVTVSS

SEQ ID NO: 293 - protein, 124 aa, synthetic construct
  REGION 1..124: note = Synthetic
QVQLQQSGGGSVQAGGSLRLSCRASARASSIGAMAWFRQAPGKDRELVAAVTAGADTTYYRDFVKGRFTLSRDNAKNTVYLQMNSLKLDDTAVYYCAAYNTAGWGEPHQSYRYWGQGTQVTVSS

SEQ ID NO: 294 - protein, 122 aa, synthetic construct
  REGION 1..122: note = Synthetic
QVQLQESGGGLVQAGGSLKLSCVASGLTFGNYDMAWFRQAPGKEREFVTHISSSGAYTSYAYFVKGRFTISRDIAKNTVYLQMNSLKPEDTAIYYCAGRRSVVVRSFDYDYWGQGTQVTVSS

SEQ ID NO: 295 - protein, 115 aa, synthetic construct
  REGION 1..115: note = Synthetic
QVQLQQSGGGLVHPGGSLRLSCAASGRIFNANGMYWYRQAPGKQRELVASLYRSGSTNYLDSVKGRFTISRDNAKNTVYLQMNSLKPEDTAVYYCNVNWALHDSWGQGTQVTVSS

SEQ ID NO: 296 - protein, 123 aa, synthetic construct
  REGION 1..123: note = Synthetic
QVQLQESGGGLVQAGDSLRLSCAASERTFSSDGMAWFRQATGKEREFVAGISRTGSATAYAEFVKSRFTISRDNAKNTVYLQMNSLKAEDTAVYYCAANSGGHWWRGATYDYWGQGTQVTVSS

SEQ ID NO: 297 - protein, 115 aa, synthetic construct
  REGION 1..115: note = Synthetic
QVQLQESGGGLVQAGGSLRLSCTASGTIFSANGMYWYRQALGQRRELVASLYRDGSTNYADSVKGRFTISRDNAKNTVYLQMNSLKPEDTAVYYCNVNWALHDSWGQGTQVTVSS

SEQ ID NO: 298 - protein, 125 aa, synthetic construct
  REGION 1..125: note = Synthetic
QVQLQESGGGVVQAGDSLRLSCTASTRASIVGAMAWFRQAPGRNRDIVAAIAAGSPSTPYYADSVKGRFAISRDNAKNTVYLQMNSLKSEDTAIYYCAAYNTANWGQPHQSYRHWGQGIQVTVSS

SEQ ID NO: 299 - protein, 118 aa, synthetic construct
  REGION 1..118: note = Synthetic
QVQLQESGGGLVQPGGSLRLSAAASGSILNINVMAWFRQAPGKQREWVASIYRDGSTYYADSVKGRFTISRDNAKNTVYLQMNSLKPEDTAVYYCNVVTYGSNRRDFWGQGTQVTVST

SEQ ID NO: 300 - protein, 123 aa, synthetic construct
  REGION 1..123: note = Synthetic
QVQLQESGGGLVQAGDSLRLSCAASGRTFSSYAMGWFRQAPGKDREFVSTISRSGGSTYYADSVKGRFTISRDNAKNTVYLQMNSLKPEDTAVYYCAANRYGSSSYQGQYGSWGQGTQVTVSS

SEQ ID NO: 301 - protein, 123 aa, synthetic construct
  REGION 1..123: note = Synthetic
QVQLQQSGGGLVQAGDSLRLSCAASGRTFSSYAMGWFRQAPGKEREFVASISRSGGSTYYADSVKVRFTISRDNAKNTVYLQMNSLKPEDTAVYYCAANRYGSSSYQGQYDYWGQGTQVTVSS

SEQ ID NO: 302 - protein, 115 aa, synthetic construct
  REGION 1..115: note = Synthetic
QVQLQESGGGLVQAGGSLRLSCTASGTIFSINGMYWYRQALGKRRELVASLYRGGSTNYADSVKGRFTISRDNAKNTVYLQMNSLKPEDTAVYYCNVNWALQDSWGQGTQVTVSS

SEQ ID NO: 303 - protein, 115 aa, synthetic construct
  REGION 1..115: note = Synthetic
QVQLQESGGGLVQAGGSLRLSCAASTSDGSINVMDWYRQTPGKQRDLVATITSLGSQVYADSVKGRFTISRDNAKDTVYLQMNSLKPEDTAVYYCRARRGWAIYWGQGTQVTVSS

SEQ ID NO: 304 - protein, 128 aa, synthetic construct
  REGION 1..128: note = Synthetic
QVQLQQSGGGLVQAGGSLRLSCAASGRTFNIYAMGWFRQAPGKEREFVAGISDSGGSANYADSVKDRFTISMDNAKNTVYLQMNSLKPEDTAVYYCAADLTGLWALGLPGHYASWDSWGQGTQVTVSS

SEQ ID NO: 305 - protein, 117 aa, synthetic construct
  REGION 1..117: note = Synthetic
QVQLQESGGGLVQPGGSLRLSCAASGFTFRSSAMSWVRQVPGKGLEWVSSIGSDGENIYYADAVKGRFTISRDNAKNTMYLQMNSLKLEDTAVYYCQLGRTVLDYFKGQGTQVTVSS

SEQ ID NO: 306 - protein, 123 aa, synthetic construct
  REGION 1..123: note = Synthetic
QVQLQESGGGLVQPGGSLRLSCAASGRTFINYGMAWFRQSPGKEREFVAAVSSSGAGTAYVEPVKDRFTISRNNTKNTVYLQMNSLKPEDTALYYCAAAKAGQWGRYANYDYWGQGTQVTVSS

SEQ ID NO: 307 - protein, 123 aa, synthetic construct
  REGION 1..123: note = Synthetic
QVQLQQSGGGLVQAGDSLRLSCAASGRTFSSYAMGWFRQAPGKEREFVAAISRSGGTTYYADSVKGRFTISRDNAKNTVYLQMNTLKPEDTAVYYCAANPYGSSSYQGQYGSWGQGTQVTVSS

SEQ ID NO: 308 - protein, 123 aa, synthetic construct
  REGION 1..123: note = Synthetic
QVQLQQSGGGLVQAGDSLRLSCAASGRAFSGYAMGWFRQAPGREREFVAAISRGGGTTYYADSVKGRFTISRDNAKNTVYLQMNSLKPEDTAVYYCAANRYGSSSYQGQYGSWGQGTQVTVSS

SEQ ID NO: 309 - protein, 123 aa, synthetic construct
  REGION 1..123: note = Synthetic
QVQLQESGGGLVQAGGSLRLSCAASGRTFINYGMAWFRQSPGKEREFVAAVSSSGAGTAYVEPVKDRFTISRDNTKNTVYLQMDTLKPEDTALYYCAAAKAGHWGRDANYDYWGQGTQVTVSS

SEQ ID NO: 310 - protein, 116 aa, synthetic construct
  REGION 1..116: note = Synthetic
QVQLQESGGGMVEPGGSLRLSCAASGSISSITFMGWHRQAPGKEGEFVALIARSGTTTYADSVKGRFSISRDNAKNTVYLQMNNLKPEDTALYYCYVDRRGAVPTWGQGTQVTVSS

SEQ ID NO: 311 - protein, 116 aa, synthetic construct
  REGION 1..116: note = Synthetic
QVQLQQSGGGLVEPGGSLRLSCAASGSISSITFMGWHRQAPGEQGELVALIARSGTTTYADSVKGRFTISRDNAKNTVYLQMNNLKPEDTALYYCYVDRRDVVPTWGQGTQVTVSS

SEQ ID NO: 312 - protein, 117 aa, synthetic construct
  REGION 1..117: note = Synthetic
QVQLQESGGGLVQAGGSLRLSCAASGTGFPIITFMGYYRQAPGNQRELVAIISRGGVAKYGDSVKDRFTISRDNAKNTVYLEMNSLKPDDTAVYYCYADRFSGSPTWGQGTQVTVSS

SEQ ID NO: 313 - protein, 114 aa, synthetic construct
  REGION 1..114: note = Synthetic
QVQLQESGGGLVQPGGSLRLSCAASVSSIGTMGWFRQAPGKQPELVASISRVGTTNYANSVKGRFTVSRDNAQNTMYLQMNSLKPEDTAVYLCFANVISGPVYWGQGTQVTVSS

SEQ ID NO: 314 - protein, 123 aa, synthetic construct
  REGION 1..123: note = Synthetic
QVQLQESGGGLVQAGGSLRLSCAASTRFFSNYAMGWFRQAPGKEREFVAAISRDGAVPLSGNSVPGRFTISRDNAKNTLYLQMNSLKPEDSAVYYCAASRQGNPYAQTSYDYWGQGTQVTVSS

SEQ ID NO: 315 - protein, 120 aa, synthetic construct
  REGION 1..120: note = Synthetic
QVQLQESGGEVVAPGGSLSLSCVASGSADSIKIMGWYRQAPGKQRELVATITSGGTTEFAESVKGRFTISRDNAKNTLYMQMNSLSPEDTAVYYCNALVSRRDSAAYFAWGQGTQVTVSS

SEQ ID NO: 316 - protein, 115 aa, synthetic construct
  REGION 1..115: note = Synthetic
QVQLQESGGGLVQPGGSLRLSCAASESIVSITPMMWYRQAPGKQREWVAITTRDGAPAYADSVKGRFTISRDSAKNTVYLQMNYLKPEDTAVYFCKARKDSHDYWGQGTQVTVSS

SEQ ID NO: 317 - protein, 119 aa, synthetic construct
  REGION 1..119: note = Synthetic
QVQLQESGGGLVQAGGSLRLSCAASETIGSIQRMGWYRQAPGKQRELVATRTNGGTTNYGDSVRGRFTISVDVAKNTVYLQMNSLKPEDTAVYYCNAHIREYYSTYDYWGQGTQVTVSS

SEQ ID NO: 318 - protein, 120 aa, synthetic construct
  REGION 1..120: note = Synthetic
QVQLQESGGGLVQPGGSLRLSCSASGSISRIRDMAWHRQVPGKQRELVASISSGGSTNVADSLKGRFTISRDNGKNTMYLQMDSLKSEDTAVYYCNALFNPIDGPARYYWGQGTQVTVSS

SEQ ID NO: 319 - protein, 120 aa, synthetic construct
  REGION 1..120: note = Synthetic
QVQLQESGGGLVQPGGSLRLSCSASGSISRIYDMAWHRQVPGKQRELVAGISRGGSTNVADSLKGRFTISRDNGKNTVYLQMDNLKSEDTAVYYCTALFNPVDGTARYYWGQGTQVTVSS

SEQ ID NO: 320 - protein, 120 aa, synthetic construct
  REGION 1..120: note = Synthetic
QVQLQESGGGLVQAGGSLRLSCAASGTIFSINVMGWYRQAPGKQRELVASITSGGQIKYADSVKGRFTTSRDNAKNTVYLQMNSLKPEDTAVYYCNAASSTWPPRDYDYWGQGTQVTVSS

SEQ ID NO: 321 - protein, 120 aa, synthetic construct
  REGION 1..120: note = Synthetic
QVQLQESGGGLVQPGGSLRLSCAASRSISSIAAMGWYRQAPGKQRELVARITNGGSTNYADSVKGRFTISRDNAKNTVYLQMNSLKPEDTAVYYCNADERPYYGDSVLSWGQGTQVTVSS

SEQ ID NO: 322 - protein, 117 aa, synthetic construct
  REGION 1..117: note = Synthetic
QVQLQQSGGGLVQAGGSLRLSCAASGTGFPIITFMGYYRQTPGNQREEVALINRGGVAKYGDSVKDRFTISRDNAKNTVYLEMNNLKPDDTAVYYCYADRFSGSPTWGQGTQVTVSS

SEQ ID NO: 323 - protein, 125 aa, synthetic construct
  REGION 1..125: note = Synthetic
QVQLQESGGGLVQAGGSLRLSCAASGRTFSNYHMAWFRQAPGKEREFVAAISRGTSTTFYRDSVRDRFTISRDNAKNTAYLQMNSLKPEDTAVYYCAADADRSTTIYSRDIYDYWGQGTQVTVSS

SEQ ID NO: 324 - protein, 123 aa, synthetic construct
  REGION 1..123: note = Synthetic
QVQLQESGGGLVQAGDSLRLSCAASEGTFSNYRMGWFRQAPGKEREFVAAISRDGAVPLSGNSPLGRFTISRDNAKNTLYLQMNSLKPEDTAVYYCAASRQGLPYVETSYDYWGQGTQVTVSS

SEQ ID NO: 325 - protein, 116 aa, synthetic construct
  REGION 1..116: note = Synthetic
QVQLQESGGGLVQPGGSLRLSCVASGSISSITFMGWYRQVLGEQRELVALSARRGTTTYADSVKGRFTISRDNAKNTVYLQMNNLKPEDTALYYCYVDRRDEVPTWGQGTQVTVSS

SEQ ID NO: 326 - protein, 125 aa, synthetic construct
  REGION 1..125: note = Synthetic
QVQLQQSGGGLVQAGGSLRLSCAASGGTFSSYVMAWFRQAPGKEREFLAAIRWSRGSTYYADSVKGRFTVFRDTVENTVYLQMNSLKPEDTAVYYCAADGNPAKLVLDQYGMDYWGKGTLVTVSS

SEQ ID NO: 327 - protein, 116 aa, synthetic construct
  REGION 1..116: note = Synthetic
QVQLQQSGGGLVEPGGSLRLSCAASGSISEITYMGWHRQAPGEQRELVALIARVGTTRYADSVKGRFTISRDNAKNTVYLQMNNLKPEDTALYYCYVDQRGVVPTWGQGTQVTVSS

SEQ ID NO: 328 - protein, 124 aa, synthetic construct
  REGION 1..124: note = Synthetic
QVQLQESGGGSVQAGGSLRLSCRASARASSIGAMAWFRQAPGKDRELVAAVNAGADTTYYRDFVKGRFTISRDNAKNTVYLQMNSLKLDDTAVYYCAAYNTAGWGEPHQSYRYWGQGIQVTVSS

SEQ ID NO: 329 - protein, 121 aa, synthetic construct
  REGION 1..121: note = Synthetic
QVQLQESGGGLVQPGGSLSLSCAASGSIFIISTMGWYRQAPGKQRELVATITSGGSTNYADPVKGRFTISRDNAKNMVYLQMNSLKPEDTAVYYCNAEVHVWGVPGPRDYWGQGTQVTVSS

SEQ ID NO: 330 - protein, 123 aa, synthetic construct
  REGION 1..123: note = Synthetic
QVQLQESGGGLVQAGDSLRLSCAASGRTFSSYAMGWFRQAPGKEREFVATISRSGGSTYYADSVKGRFTISRDNAKNTVYLQMNSLKPEDTAVYYCAANPYGSSSYQGQYASWGQGTQVTVSS

SEQ ID NO: 331 - protein, 115 aa, synthetic construct
  REGION 1..115: note = Synthetic
QVQLQQSGGGLVQAGGSLRLSCAASGSIFSSNGMYWYRQAPGKQRELVASLYRSGSTNYADSVKGRFIISRDNAKNTVYLQMNSLKPEDTAVYYCNVNWALHDSWGQGTQVTVSS

SEQ ID NO: 332 - protein, 123 aa, synthetic construct
  REGION 1..123: note = Synthetic
QVQLQESGGGLVQAGGSLRLSCAASGRTFSAYGMAWFRQSPGKEREFVAAVSGGGGGTAYAEPVKDRFTISRDNAKNTVYLQMNTLKPEDTALYYCAAATAGHWGRDANYDYWGQGTQVTVSS

SEQ ID NO: 333 - protein, 115 aa, synthetic construct
  REGION 1..115: note = Synthetic
QVQLQESGGGLVQAGGSLRLSCAASGSIFSSNGMYWYRQAPGKQRELVASLFRSGSTNYADSVKGRFTISRDNAQNTVYLRMNSLKPEDTAVYYCNVNWALHDSWGPGTQVTVSS

SEQ ID NO: 334 - protein, 123 aa, synthetic construct
  REGION 1..123: note = Synthetic
QVQLQESGGGLVQAGDSLRLSCAASGRTFSSYAMGWFRQAPGKEREFVAAISRSGGTTYYADSVKGRFTISRDNAKNTVYLQMNTLKPEDTAVYYCAANPYGSSSYQGQYGSWGQGTQVTVSS

SEQ ID NO: 335 - protein, 115 aa, synthetic construct
  REGION 1..115: note = Synthetic
QVQLQESGGGLVQPGGSLRLSCAASGIIHSINVMGWYRQAPGKQRELVAIISSGGRTTYADSVKGRSTITGDNDKNTVYLQMNSLKPEDTAVYYCTMVWGLRYYWGQGTQVTVSS

SEQ ID NO: 336 - protein, 115 aa, synthetic construct
  REGION 1..115: note = Synthetic
QVQLQQSGGGFVRPGESLTLSCAASTSIFSSNGMYWYRQAPGKRRELVASLFRSGSTNYADSVKGRFTISRDNAKNTVYLQMNSLKPEDTAVYYCNVNWALHDSWGQGTQVTVSS

SEQ ID NO: 337 - protein, 123 aa, synthetic construct
  REGION 1..123: note = Synthetic
QVQLQESGGGLVQAGDSLRLSCAASGRTFSSYAMAWFRQAPGKEREFVAAISRGGGTTYYADSVKGRFTISRDNAKNTVYLQMNSLKPEDTAVYYCAANPYGSSSYQGQYGSWGQGTQVTVSS

SEQ ID NO: 338 - protein, 115 aa, synthetic construct
  REGION 1..115: note = Synthetic
QVQLQESGGGLVQAGGSLRLSCAASGSIFSSNGMYWYRQAPGKQRELVASLYRSGSTNYADSVKGRFIISRDNAKNTVYLQMNSLKPEDTAVYYCNVNWALHDSWGQGTQVTVSS

SEQ ID NO: 339 - protein, 115 aa, synthetic construct
  REGION 1..115: note = Synthetic
QVQLQQSGGGEVQPGGSLRLSCAASGSIFSSNGMYWYRQAPGKQRELVASLYRSGSTNYADSVKGRFIISRDNAKNTVYLQMNSLKPEDTAVYYCNVNWALHDSWGQGTQVTVSS

SEQ ID NO: 340 - protein, 115 aa, synthetic construct
  REGION 1..115: note = Synthetic
QVQLQESGGGLVQAGGSLRLSCAASRSILSANGMYWYRQAPGKQRELVASLYRSGSTDYADSVKGRFTISRDDSRDTMYLQMNSLKPEDTAVYYCNVNWALHDSWGQGTQVTVSS

SEQ ID NO: 341 - protein, 9 aa, synthetic construct
  REGION 1..9: note = Synthetic
ASIISIRVM

SEQ ID NO: 342 - protein, 9 aa, synthetic construct
  REGION 1..9: note = Synthetic
GSIMSIRVM

SEQ ID NO: 343 - protein, 9 aa, synthetic construct
  REGION 1..9: note = Synthetic
GSIFSIRVM

SEQ ID NO: 344 - protein, 9 aa, synthetic construct
  REGION 1..9: note = Synthetic
ASIFSIRVM

SEQ ID NO: 345 - protein, 9 aa, synthetic construct
  REGION 1..9: note = Synthetic
GSIMSIRVM

SEQ ID NO: 346 - protein, 9 aa, synthetic construct
  REGION 1..9: note = Synthetic
ASIMSIRVM

SEQ ID NO: 347 - protein, 9 aa, synthetic construct
  REGION 1..9: note = Synthetic
ASIMSIRVM

SEQ ID NO: 348 - protein, 9 aa, synthetic construct
  REGION 1..9: note = Synthetic
GSIMSIRVM

SEQ ID NO: 349 - protein, 9 aa, synthetic construct
  REGION 1..9: note = Synthetic
GSIISIRVM

SEQ ID NO: 350 - protein, 9 aa, synthetic construct
  REGION 1..9: note = Synthetic
ASIISIRVM

SEQ ID NO: 351 - protein, 9 aa, synthetic construct
  REGION 1..9: note = Synthetic
GSIFSINVM

SEQ ID NO: 352 - protein, 9 aa, synthetic construct
  REGION 1..9: note = Synthetic
GRTFSIYAM

SEQ ID NO: 353 - protein, 9 aa, synthetic construct
  REGION 1..9: note = Synthetic
GSGRRVGYM

SEQ ID NO: 354 - protein, 9 aa, synthetic construct
  REGION 1..9: note = Synthetic
GRTFSIYAM

SEQ ID NO: 355 - protein, 9 aa, synthetic construct
  REGION 1..9: note = Synthetic
GMSFSLGTI

SEQ ID NO: 356 - protein, 9 aa, synthetic construct
  REGION 1..9: note = Synthetic
GSGRRVGYM

SEQ ID NO: 357 - protein, 9 aa, synthetic construct
  REGION 1..9: note = Synthetic
GSGRRVGYM

SEQ ID NO: 358 - protein, 9 aa, synthetic construct
  REGION 1..9: note = Synthetic
GSGSRINYM

SEQ ID NO: 359 - protein, 9 aa, synthetic construct
  REGION 1..9: note = Synthetic
GRTFSTYTV

SEQ ID NO: 360 - protein, 9 aa, synthetic construct
  REGION 1..9: note = Synthetic
GSGSRINYM

SEQ ID NO: 361 - protein, 9 aa, synthetic construct
  REGION 1..9: note = Synthetic
GFTFSRNYM

SEQ ID NO: 362 - protein, 9 aa, synthetic construct
  REGION 1..9: note = Synthetic
GSGRRVGYM

SEQ ID NO: 363 - protein, 9 aa, synthetic construct
  REGION 1..9: note = Synthetic
GSGRRVGYM

SEQ ID NO: 364 - protein, 9 aa, synthetic construct
  REGION 1..9: note = Synthetic
GRTFSGRTM

SEQ ID NO: 365 - protein, 9 aa, synthetic construct
  REGION 1..9: note = Synthetic
GSIGTIDSM

SEQ ID NO: 366 - protein, 9 aa, synthetic construct
  REGION 1..9: note = Synthetic
EFSLLFGTI

SEQ ID NO: 367 - protein, 9 aa, synthetic construct
  REGION 1..9: note = Synthetic
GSITRVGGM

SEQ ID NO: 368 - protein, 9 aa, synthetic construct
  REGION 1..9: note = Synthetic
PFSLRLGVV

SEQ ID NO: 369 - protein, 9 aa, synthetic construct
  REGION 1..9: note = Synthetic
ARTSSSRAM

SEQ ID NO: 370 - protein, 9 aa, synthetic construct
  REGION 1..9: note = Synthetic
GSTFIFDKM

SEQ ID NO: 371 - protein, 9 aa, synthetic construct
  REGION 1..9: note = Synthetic
GRTFSGVIV

SEQ ID NO: 372 - protein, 9 aa, synthetic construct
  REGION 1..9: note = Synthetic
RIVFTISTM

SEQ ID NO: 373 - protein, 9 aa, synthetic construct
  REGION 1..9: note = Synthetic
GSITRLGSM

SEQ ID NO: 374 - protein, 9 aa, synthetic construct
  REGION 1..9: note = Synthetic
GSITRLGGM

SEQ ID NO: 375 - protein, 8 aa, synthetic construct
  REGION 1..8: note = Synthetic
ERAFMYNM

SEQ ID NO: 376 - protein, 6 aa, synthetic construct
  REGION 1..6: note = Synthetic
SSFNTM

SEQ ID NO: 377 - protein, 9 aa, synthetic construct
  REGION 1..9: note = Synthetic
GRNFDYYSM

SEQ ID NO: 378 - protein, 9 aa, synthetic construct
  REGION 1..9: note = Synthetic
GSMFSINDM

SEQ ID NO: 379 - protein, 9 aa, synthetic construct
  REGION 1..9: note = Synthetic
GRTFSRYHM

SEQ ID NO: 380 - protein, 9 aa, synthetic construct
  REGION 1..9: note = Synthetic
GRTSNSYNM

SEQ ID NO: 381 - protein, 9 aa, synthetic construct
  REGION 1..9: note = Synthetic
GSTFSFNKM

SEQ ID NO: 382 - protein, 9 aa, synthetic construct
  REGION 1..9: note = Synthetic
PLTLRLGPI

SEQ ID NO: 383 - protein, 9 aa, synthetic construct
  REGION 1..9: note = Synthetic
GRNFGYYTM

SEQ ID NO: 384 - protein, 9 aa, synthetic construct
  REGION 1..9: note = Synthetic
GDIFSAAGM

SEQ ID NO: 385 - protein, 9 aa, synthetic construct
  REGION 1..9: note = Synthetic
PLTLRLGAI

SEQ ID NO: 386 - protein, 9 aa, synthetic construct
  REGION 1..9: note = Synthetic
GSITRIGGM

SEQ ID NO: 387 - protein, 9 aa, synthetic construct
  REGION 1..9: note = Synthetic
GRSFSRYIM

SEQ ID NO: 388 - protein, 9 aa, synthetic construct
  REGION 1..9: note = Synthetic
GSGSRIGFM

SEQ ID NO: 389 - protein, 9 aa, synthetic construct
  REGION 1..9: note = Synthetic
GLTFSDYAM

SEQ ID NO: 390 - protein, 9 aa, synthetic construct
  REGION 1..9: note = Synthetic
GTISIFDPM

SEQ ID NO: 391 - protein, 9 aa, synthetic construct
  REGION 1..9: note = Synthetic
RNIYGINVI

SEQ ID NO: 392 - protein, 9 aa, synthetic construct
  REGION 1..9: note = Synthetic
GTLSLFDPM

SEQ ID NO: 393 - protein, 9 aa, synthetic construct
  REGION 1..9: note = Synthetic
GRVLSINAM

SEQ ID NO: 394 - protein, 9 aa, synthetic construct
  REGION 1..9: note = Synthetic
RTTFRVGTM

SEQ ID NO: 395 - protein, 9 aa, synthetic construct
  REGION 1..9: note = Synthetic
GSGSRIGLM

SEQ ID NO: 396 - protein, 9 aa, synthetic construct
  REGION 1..9: note = Synthetic
GTISLFDSM

SEQ ID NO: 397 - protein, 9 aa, synthetic construct
  REGION 1..9: note = Synthetic
ETSLNFDDM

SEQ ID NO: 398 - protein, 9 aa, synthetic construct
  REGION 1..9: note = Synthetic
GSDSSINYM

SEQ ID NO: 399 - protein, 6 aa, synthetic construct
  REGION 1..6: note = Synthetic
GTVNLM

SEQ ID NO: 400 - protein, 9 aa, synthetic construct
  REGION 1..9: note = Synthetic
GSIFSRNII

SEQ ID NO: 401 - protein, 8 aa, synthetic construct
  REGION 1..8: note = Synthetic
GSGSINYM

SEQ ID NO: 402 - protein, 9 aa, synthetic construct
  REGION 1..9: note = Synthetic
GSGWRVGYM

SEQ ID NO: 403 - protein, 9 aa, synthetic construct
  REGION 1..9: note = Synthetic
GENFSTYVM

SEQ ID NO: 404 - protein, 9 aa, synthetic construct
  REGION 1..9: note = Synthetic
GRTFSSYAM

SEQ ID NO: 405 - protein, 9 aa, synthetic construct
  REGION 1..9: note = Synthetic
GRTFSSYHM

SEQ ID NO: 406 - protein, 9 aa, synthetic construct
  REGION 1..9: note = Synthetic
GRTFINYGM

SEQ ID NO: 407 - protein, 9 aa, synthetic construct
  REGION 1..9: note = Synthetic
GRTLTAYGM

SEQ ID NO: 408 - protein, 9 aa, synthetic construct
  REGION 1..9: note = Synthetic
GRTFSTYAM

SEQ ID NO: 409 - protein, 9 aa, synthetic construct
  REGION 1..9: note = Synthetic
GSIGSINIM

SEQ ID NO: 410 - protein, 9 aa, synthetic construct
  REGION 1..9: note = Synthetic
GRTFSSYGM

SEQ ID NO: 411 - protein, 9 aa, synthetic construct
  REGION 1..9: note = Synthetic
ARASSIGAM

SEQ ID NO: 412 - protein, 9 aa, synthetic construct
  REGION 1..9: note = Synthetic
GLTFGNYDM

SEQ ID NO: 413 - protein, 9 aa, synthetic construct
  REGION 1..9: note = Synthetic
GRIFNANGM

SEQ ID NO: 414 - protein, 9 aa, synthetic construct
  REGION 1..9: note = Synthetic
ERTFSSDGM

SEQ ID NO: 415 - protein, 9 aa, synthetic construct
  REGION 1..9: note = Synthetic
GTIFSANGM

SEQ ID NO: 416 - protein, 9 aa, synthetic construct
  REGION 1..9: note = Synthetic
TRASIVGAM

SEQ ID NO: 417 - protein, 9 aa, synthetic construct
  REGION 1..9: note = Synthetic
GSILNINVM

SEQ ID NO: 418 - protein, 9 aa, synthetic construct
  REGION 1..9: note = Synthetic
GRTFSSYAM

SEQ ID NO: 419 - protein, 9 aa, synthetic construct
  REGION 1..9: note = Synthetic
GRTFSSYAM

SEQ ID NO: 420 - protein, 9 aa, synthetic construct
  REGION 1..9: note = Synthetic
GTIFSINGM

SEQ ID NO: 421 - protein, 9 aa, synthetic construct
  REGION 1..9: note = Synthetic
TSDGSINVM

SEQ ID NO: 422 - protein, 9 aa, synthetic construct
  REGION 1..9: note = Synthetic
GRTFNIYAM

SEQ ID NO: 423 - protein, 9 aa, synthetic construct
  REGION 1..9: note = Synthetic
GFTFRSSAM

SEQ ID NO: 424 - protein, 9 aa, synthetic construct
  REGION 1..9: note = Synthetic
GRTFINYGM

SEQ ID NO: 425 - protein, 9 aa, synthetic construct
  REGION 1..9: note = Synthetic
GRTFSSYAM

SEQ ID NO: 426 - protein, 9 aa, synthetic construct
  REGION 1..9: note = Synthetic
GRAFSGYAM

SEQ ID NO: 427 - protein, 9 aa, synthetic construct
  REGION 1..9: note = Synthetic
GRTFINYGM

SEQ ID NO: 428 - protein, 9 aa, synthetic construct
  REGION 1..9: note = Synthetic
GSISSITFM

SEQ ID NO: 429 - protein, 9 aa, synthetic construct
  REGION 1..9: note = Synthetic
GSISSITFM

SEQ ID NO: 430 - protein, 10 aa, synthetic construct
  REGION 1..10: note = Synthetic
GTGFPIITFM

SEQ ID NO: 431 - protein, 7 aa, synthetic construct
  REGION 1..7: note = Synthetic
VSSIGTM

SEQ ID NO: 432 - protein, 9 aa, synthetic construct
  REGION 1..9: note = Synthetic
TRFFSNYAM

SEQ ID NO: 433 - protein, 9 aa, synthetic construct
  REGION 1..9: note = Synthetic
GSADSIKIM

SEQ ID NO: 434 - protein, 9 aa, synthetic construct
  REGION 1..9: note = Synthetic
ESIVSITPM

SEQ ID NO: 435 - protein, 9 aa, synthetic construct
  REGION 1..9: note = Synthetic
ETIGSIQRM

SEQ ID NO: 436 - protein, 9 aa, synthetic construct
  REGION 1..9: note = Synthetic
GSISRIRDM

SEQ ID NO: 437 - protein, 9 aa, synthetic construct
  REGION 1..9: note = Synthetic
GSISRIYDM

SEQ ID NO: 438 - protein, 9 aa, synthetic construct
  REGION 1..9: note = Synthetic
GTIFSINVM

SEQ ID NO: 439 - protein, 9 aa, synthetic construct
  REGION 1..9: note = Synthetic
RSISSIAAM

SEQ ID NO: 440 - protein, 10 aa, synthetic construct
  REGION 1..10: note = Synthetic
GTGFPIITFM

SEQ ID NO: 441 - protein, 9 aa, synthetic construct
  REGION 1..9: note = Synthetic
GRTFSNYHM

SEQ ID NO: 442 - protein, 9 aa, synthetic construct
  REGION 1..9: note = Synthetic
EGTFSNYRM

SEQ ID NO: 443 - protein, 9 aa, synthetic construct
  REGION 1..9: note = Synthetic
GSISSITFM

SEQ ID NO: 444 - protein, 9 aa, synthetic construct
  REGION 1..9: note = Synthetic
GGTFSSYVM

SEQ ID NO: 445 - protein, 9 aa, synthetic construct
  REGION 1..9: note = Synthetic
GSISEITYM

SEQ ID NO: 446 - protein, 9 aa, synthetic construct
  REGION 1..9: note = Synthetic
ARASSIGAM

SEQ ID NO: 447 - protein, 9 aa, synthetic construct
  REGION 1..9: note = Synthetic
GSIFIISTM

SEQ ID NO: 448 - protein, 9 aa, synthetic construct
  REGION 1..9: note = Synthetic
GRTFSSYAM

SEQ ID NO: 449 - protein, 9 aa, synthetic construct
  REGION 1..9: note = Synthetic
GSIFSSNGM

SEQ ID NO: 450 - protein, 9 aa, synthetic construct
  REGION 1..9: note = Synthetic
GRTFSAYGM

SEQ ID NO: 451 - protein, 9 aa, synthetic construct
  REGION 1..9: note = Synthetic
GSIFSSNGM

SEQ ID NO: 452 - protein, 9 aa, synthetic construct
  REGION 1..9: note = Synthetic
GRTFSSYAM

SEQ ID NO: 453 - protein, 9 aa, synthetic construct
  REGION 1..9: note = Synthetic
GIIHSINVM

SEQ ID NO: 454 - protein, 9 aa, synthetic construct
  REGION 1..9: note = Synthetic
TSIFSSNGM

SEQ ID NO: 455 - protein, 9 aa, synthetic construct
  REGION 1..9: note = Synthetic
GRTFSSYAM

SEQ ID NO: 456 - protein, 9 aa, synthetic construct
  REGION 1..9: note = Synthetic
GSIFSSNGM

SEQ ID NO: 457 - protein, 9 aa, synthetic construct
  REGION 1..9: note = Synthetic
GSIFSSNGM

SEQ ID NO: 458 - protein, 9 aa, synthetic construct
  REGION 1..9: note = Synthetic
RSILSANGM

SEQ ID NO: 459 - protein, 7 aa, synthetic construct
  REGION 1..7: note = Synthetic
MSRGGTI

SEQ ID NO: 460 - protein, 7 aa, synthetic construct
  REGION 1..7: note = Synthetic
MSRGGTI

SEQ ID NO: 461 - protein, 7 aa, synthetic construct
  REGION 1..7: note = Synthetic
MSRGGTI

SEQ ID NO: 462 - protein, 7 aa, synthetic construct
  REGION 1..7: note = Synthetic
MSRGNTI

SEQ ID NO: 463 - protein, 7 aa, synthetic construct
  REGION 1..7: note = Synthetic
MSRGGTI

SEQ ID NO: 464 - protein, 7 aa, synthetic construct
  REGION 1..7: note = Synthetic
MSRGNTI

SEQ ID NO: 465 - protein, 7 aa, synthetic construct
  REGION 1..7: note = Synthetic
MSRGGTI

SEQ ID NO: 466 - protein, 7 aa, synthetic construct
  REGION 1..7: note = Synthetic
MSRGNTI

SEQ ID NO: 467 - protein, 7 aa, synthetic construct
  REGION 1..7: note = Synthetic
MSRGGTI

SEQ ID NO: 468 - protein, 7 aa, synthetic construct
  REGION 1..7: note = Synthetic
MSRGNTI

SEQ ID NO: 469 - protein, 7 aa, synthetic construct
  REGION 1..7: note = Synthetic
ITSGGST

SEQ ID NO: 470 - protein, 8 aa, synthetic construct
  REGION 1..8: note = Synthetic
INRGGGTT

SEQ ID NO: 471 - protein, 7 aa, synthetic construct
  REGION 1..7: note = Synthetic
ISRAGAT

SEQ ID NO: 472 - protein, 8 aa, synthetic construct
  REGION 1..8: note = Synthetic
INRSGGTT

SEQ ID NO: 473 - protein, 7 aa, synthetic construct
  REGION 1..7: note = Synthetic
ITNADTT

SEQ ID NO: 474 - protein, 7 aa, synthetic construct
  REGION 1..7: note = Synthetic
ISRAGAT

SEQ ID NO: 475 - protein, 7 aa, synthetic construct
  REGION 1..7: note = Synthetic
ISRAGAT

SEQ ID NO: 476 - protein, 7 aa, synthetic construct
  REGION 1..7: note = Synthetic
INRTGAA

SEQ ID NO: 477 - protein, 8 aa, synthetic construct
  REGION 1..8: note = Synthetic
ITWNGGTI

SEQ ID NO: 478 - protein, 7 aa, synthetic construct
  REGION 1..7: note = Synthetic
INRTGAA

SEQ ID NO: 479 - protein, 7 aa, synthetic construct
  REGION 1..7: note = Synthetic
IYSDDST

SEQ ID NO: 480 - protein, 7 aa, synthetic construct
  REGION 1..7: note = Synthetic
ISRAGAT

SEQ ID NO: 481 - protein, 7 aa, synthetic construct
  REGION 1..7: note = Synthetic
ISRAGAT

SEQ ID NO: 482 - protein, 8 aa, synthetic construct
  REGION 1..8: note = Synthetic
ITWSGGTT

SEQ ID NO: 483 - protein, 7 aa, synthetic construct
  REGION 1..7: note = Synthetic
IMFSGRT

SEQ ID NO: 484 - protein, 8 aa, synthetic construct
  REGION 1..8: note = Synthetic
VSSSDGST

SEQ ID NO: 485 - protein, 7 aa, synthetic construct
  REGION 1..7: note = Synthetic
INEVGNT

SEQ ID NO: 486 - protein, 8 aa, synthetic construct
  REGION 1..8: note = Synthetic
ISSSEGST

SEQ ID NO: 487 - protein, 8 aa, synthetic construct
  REGION 1..8: note = Synthetic
ISWSGGRT

SEQ ID NO: 488 - protein, 7 aa, synthetic construct
  REGION 1..7: note = Synthetic
LMSRGDP

SEQ ID NO: 489 - protein, 8 aa, synthetic construct
  REGION 1..8: note = Synthetic
TLWSGGST

SEQ ID NO: 490 - protein, 8 aa, synthetic construct
  REGION 1..8: note = Synthetic
INRSGALT

SEQ ID NO: 491 - protein, 7 aa, synthetic construct
  REGION 1..7: note = Synthetic
ITAVGNT

SEQ ID NO: 492 - protein, 7 aa, synthetic construct
  REGION 1..7: note = Synthetic
IDTVGNT

SEQ ID NO: 493 - protein, 8 aa, synthetic construct
  REGION 1..8: note = Synthetic
RNWNVERT

SEQ ID NO: 494 - protein, 7 aa, synthetic construct
  REGION 1..7: note = Synthetic
ITSGGTI

SEQ ID NO: 495 - protein, 8 aa, synthetic construct
  REGION 1..8: note = Synthetic
INWRGAVI

SEQ ID NO: 496 - protein, 7 aa, synthetic construct
  REGION 1..7: note = Synthetic
ISSGGTT

SEQ ID NO: 497 - protein, 8 aa, synthetic construct
  REGION 1..8: note = Synthetic
ISLSGGGT

SEQ ID NO: 498 - protein, 8 aa, synthetic construct
  REGION 1..8: note = Synthetic
ISWTGGFT

SEQ ID NO: 499 - protein, 7 aa, synthetic construct
  REGION 1..7: note = Synthetic
FMNDGNT

SEQ ID NO: 500 - protein, 7 aa, synthetic construct
  REGION 1..7: note = Synthetic
ISSRDDK

SEQ ID NO: 501 - protein, 7 aa, synthetic construct
  REGION 1..7: note = Synthetic
ITWRGVI

SEQ ID NO: 502 - protein, 8 aa, synthetic construct
  REGION 1..8: note = Synthetic
VTWDGGTT

SEQ ID NO: 503 - protein, 7 aa, synthetic construct
  REGION 1..7: note = Synthetic
ITSTEDK

SEQ ID NO: 504 - protein, 7 aa, synthetic construct
  REGION 1..7: note = Synthetic
INTVGNT

SEQ ID NO: 505 - protein, 8 aa, synthetic construct
  REGION 1..8: note = Synthetic
IAPSGGSA

SEQ ID NO: 506 - protein, 7 aa, synthetic construct
  REGION 1..7: note = Synthetic
INRTGAT

SEQ ID NO: 507 - protein, 8 aa, synthetic construct
  REGION 1..8: note = Synthetic
ISLTAAST

SEQ ID NO: 508 - protein, 6 aa, synthetic construct
  REGION 1..6: note = Synthetic
ISEGST

SEQ ID NO: 509 - protein, 7 aa, synthetic construct
  REGION 1..7: note = Synthetic
SANGGTT

SEQ ID NO: 510 - protein, 6 aa, synthetic construct
  REGION 1..6: note = Synthetic
ISGLST

SEQ ID NO: 511 - protein, 7 aa, synthetic construct
  REGION 1..7: note = Synthetic
ITNGGST

SEQ ID NO: 512 - protein, 7 aa, synthetic construct
  REGION 1..7: note = Synthetic
ITSGGST

SEQ ID NO: 513 - protein, 7 aa, synthetic construct
  REGION 1..7: note = Synthetic
IKGTGTT

SEQ ID NO: 514 - protein, 6 aa, synthetic construct
  REGION 1..6: note = Synthetic
ITEGST

SEQ ID NO: 515 - protein, 10 aa, synthetic construct
  REGION 1..10: note = Synthetic
INTFPAGTTA

SEQ ID NO: 516 - protein, 7 aa, synthetic construct
  REGION 1..7: note = Synthetic
ISRDGRS

SEQ ID NO: 517 - protein, 7 aa, synthetic construct
  REGION 1..7: note = Synthetic
IKGTGTT

SEQ ID NO: 518 - protein, 7 aa, synthetic construct
  REGION 1..7: note = Synthetic
INTGGRT

SEQ ID NO: 519 - protein, 7 aa, synthetic construct
  REGION 1..7: note = Synthetic
INRTGAA

SEQ ID NO: 520 - protein, 7 aa, synthetic construct
  REGION 1..7: note = Synthetic
ISRAGAT

SEQ ID NO: 521 - protein, 8 aa, synthetic construct
  REGION 1..8: note = Synthetic
HNWRGGGT

SEQ ID NO: 522 - protein, 8 aa, synthetic construct
  REGION 1..8: note = Synthetic
ISRSGGST

SEQ ID NO: 523 - protein, 8 aa, synthetic construct
  REGION 1..8: note = Synthetic
ISRSGGFT

SEQ ID NO: 524 - protein, 8 aa, synthetic construct
  REGION 1..8: note = Synthetic
VSISGAGT

SEQ ID NO: 525 - protein, 8 aa, synthetic construct
  REGION 1..8: note = Synthetic
VSLSGAST

SEQ ID NO: 526 - protein, 8 aa, synthetic construct
  REGION 1..8: note = Synthetic
ISWSGGRI

SEQ ID NO: 527 - protein, 7 aa, synthetic construct
  REGION 1..7: note = Synthetic
FTSGGST

SEQ ID NO: 528 - protein, 8 aa, synthetic construct
  REGION 1..8: note = Synthetic
ISRTGSGT

SEQ ID NO: 529 - protein, 8 aa, synthetic construct
  REGION 1..8: note = Synthetic
VTAGADTT

SEQ ID NO: 530 - protein, 8 aa, synthetic construct
  REGION 1..8: note = Synthetic
ISSSGAYT

SEQ ID NO: 531 - protein, 7 aa, synthetic construct
  REGION 1..7: note = Synthetic
LYRSGST

SEQ ID NO: 532 - protein, 8 aa, synthetic construct
  REGION 1..8: note = Synthetic
ISRTGSAT

SEQ ID NO: 533 - protein, 7 aa, synthetic construct
  REGION 1..7: note = Synthetic
LYRDGST

SEQ ID NO: 534 - protein, 9 aa, synthetic construct
  REGION 1..9: note = Synthetic
IAAGSPSTP

SEQ ID NO: 535 - protein, 7 aa, synthetic construct
  REGION 1..7: note = Synthetic
IYRDGST

SEQ ID NO: 536 - protein, 8 aa, synthetic construct
  REGION 1..8: note = Synthetic
ISRSGGST

SEQ ID NO: 537 - protein, 8 aa, synthetic construct
  REGION 1..8: note = Synthetic
ISRSGGST

SEQ ID NO: 538 - protein, 7 aa, synthetic construct
  REGION 1..7: note = Synthetic
LYRGGST

SEQ ID NO: 539 - protein, 7 aa, synthetic construct
  REGION 1..7: note = Synthetic
ITSLGSQ

SEQ ID NO: 540 - protein, 8 aa, synthetic construct
  REGION 1..8: note = Synthetic
ISDSGGSA

SEQ ID NO: 541 - protein, 8 aa, synthetic construct
  REGION 1..8: note = Synthetic
IGSDGENI

SEQ ID NO: 542 - protein, 8 aa, synthetic construct
  REGION 1..8: note = Synthetic
VSSSGAGT

SEQ ID NO: 543 - protein, 8 aa, synthetic construct
  REGION 1..8: note = Synthetic
ISRSGGTT

SEQ ID NO: 544 - protein, 8 aa, synthetic construct
  REGION 1..8: note = Synthetic
ISRGGGTT

SEQ ID NO: 545 - protein, 8 aa, synthetic construct
  REGION 1..8: note = Synthetic
VSSSGAGT

SEQ ID NO: 546 - protein, 7 aa, synthetic construct
  REGION 1..7: note = Synthetic
IARSGTT

SEQ ID NO: 547 - protein, 7 aa, synthetic construct
  REGION 1..7: note = Synthetic
IARSGTT

SEQ ID NO: 548 - protein, 7 aa, synthetic construct
  REGION 1..7: note = Synthetic
ISRGGVA

SEQ ID NO: 549 - protein, 7 aa, synthetic construct
  REGION 1..7: note = Synthetic
ISRVGTT

SEQ ID NO: 550 - protein, 8 aa, synthetic construct
  REGION 1..8: note = Synthetic
ISRDGAVP

SEQ ID NO: 551 - protein, 7 aa, synthetic construct
  REGION 1..7: note = Synthetic
ITSGGTT

SEQ ID NO: 552 - protein, 7 aa, synthetic construct
  REGION 1..7: note = Synthetic
TTRDGAP

SEQ ID NO: 553 - protein, 7 aa, synthetic construct
  REGION 1..7: note = Synthetic
RTNGGTT

SEQ ID NO: 554 - protein, 7 aa, synthetic construct
  REGION 1..7: note = Synthetic
ISSGGST

SEQ ID NO: 555 - protein, 7 aa, synthetic construct
  REGION 1..7: note = Synthetic
ISRGGST

SEQ ID NO: 556 - protein, 7 aa, synthetic construct
  REGION 1..7: note = Synthetic
ITSGGQI

SEQ ID NO: 557 - protein, 7 aa, synthetic construct
  REGION 1..7: note = Synthetic
ITNGGST

SEQ ID NO: 558 - protein, 7 aa, synthetic construct
  REGION 1..7: note = Synthetic
INRGGVA

SEQ ID NO: 559 - protein, 8 aa, synthetic construct
  REGION 1..8: note = Synthetic
ISRGTSTT

SEQ ID NO: 560 - protein, 8 aa, synthetic construct
  REGION 1..8: note = Synthetic
ISRDGAVP

SEQ ID NO: 561 - protein, 7 aa, synthetic construct
  REGION 1..7: note = Synthetic
SARRGTT

SEQ ID NO: 562 - protein, 8 aa, synthetic construct
  REGION 1..8: note = Synthetic
IRWSRGST

SEQ ID NO: 563 - protein, 7 aa, synthetic construct
  REGION 1..7: note = Synthetic
IARVGTT

SEQ ID NO: 564 - protein, 8 aa, synthetic construct
  REGION 1..8: note = Synthetic
VNAGADTT

SEQ ID NO: 565 - protein, 7 aa, synthetic construct
  REGION 1..7: note = Synthetic
ITSGGST

SEQ ID NO: 566 - protein, 8 aa, synthetic construct
  REGION 1..8: note = Synthetic
ISRSGGST

SEQ ID NO: 567 - protein, 7 aa, synthetic construct
  REGION 1..7: note = Synthetic
LYRSGST

SEQ ID NO: 568 - protein, 8 aa, synthetic construct
  REGION 1..8: note = Synthetic
VSGGGGGT

SEQ ID NO: 569 - protein, 7 aa, synthetic construct
  REGION 1..7: note = Synthetic
LFRSGST

SEQ ID NO: 570 - protein, 8 aa, synthetic construct
  REGION 1..8: note = Synthetic
ISRSGGTT

SEQ ID NO: 571 - protein, 7 aa, synthetic construct
  REGION 1..7: note = Synthetic
ISSGGRT

SEQ ID NO: 572 - protein, 7 aa, synthetic construct
  REGION 1..7: note = Synthetic
LFRSGST

SEQ ID NO: 573 - protein, 8 aa, synthetic construct
  REGION 1..8: note = Synthetic
ISRGGGTT

SEQ ID NO: 574 - protein, 7 aa, synthetic construct
  REGION 1..7: note = Synthetic
LYRSGST

SEQ ID NO: 575 - protein, 7 aa, synthetic construct
  REGION 1..7: note = Synthetic
LYRSGST

SEQ ID NO: 576 - protein, 7 aa, synthetic construct
  REGION 1..7: note = Synthetic
LYRSGST

SEQ ID NO: 577 - protein, 8 aa, synthetic construct
  REGION 1..8: note = Synthetic
AALLDSYY

SEQ ID NO: 578 - protein, 8 aa, synthetic construct
  REGION 1..8: note = Synthetic
TALLDSYY

SEQ ID NO: 579 - protein, 8 aa, synthetic construct
  REGION 1..8: note = Synthetic
TALLDSYY

SEQ ID NO: 580 - protein, 8 aa, synthetic construct
  REGION 1..8: note = Synthetic
AALLDSYY

SEQ ID NO: 581 - protein, 8 aa, synthetic construct
  REGION 1..8: note = Synthetic
AALLDSYY

SEQ ID NO: 582 - protein, 8 aa, synthetic construct
  REGION 1..8: note = Synthetic
AALLDSYY

SEQ ID NO: 583 - protein, 8 aa, synthetic construct
  REGION 1..8: note = Synthetic
AALLDSYY

SEQ ID NO: 584 - protein, 8 aa, synthetic construct
  REGION 1..8: note = Synthetic
AALLDSYY

SEQ ID NO: 585 - protein, 8 aa, synthetic construct
  REGION 1..8: note = Synthetic
AALLDSYY

SEQ ID NO: 586 - protein, 8 aa, synthetic construct
  REGION 1..8: note = Synthetic
AALLDSYY

SEQ ID NO: 587 - protein, 17 aa, synthetic construct
  REGION 1..17: note = Synthetic
NAAQSRTSWLFPDEYDY

SEQ ID NO: 588 - protein, 19 aa, synthetic construct
  REGION 1..19: note = Synthetic
AADRVTDTYYYLNPESYDY

SEQ ID NO: 589 - protein, 10 aa, synthetic construct
  REGION 1..10: note = Synthetic
FASLIDAGTY

SEQ ID NO: 590 - protein, 19 aa, synthetic construct
  REGION 1..19: note = Synthetic
AADRVTDTYYYLNPESYDY

SEQ ID NO: 591 - protein, 5 aa, synthetic construct
  REGION 1..5: note = Synthetic
NTATS

SEQ ID NO: 592 - protein, 10 aa, synthetic construct
  REGION 1..10: note = Synthetic
FASVFDAGTY

SEQ ID NO: 593 - protein, 10 aa, synthetic construct
  REGION 1..10: note = Synthetic
FASIFDAGTY

SEQ ID NO: 594 - protein, 10 aa, synthetic construct
  REGION 1..10: note = Synthetic
FASYLGAGAY

SEQ ID NO: 595 - protein, 11 aa, synthetic construct
  REGION 1..11: note = Synthetic
VMGAAGQGWRY

SEQ ID NO: 596 - protein, 10 aa, synthetic construct
  REGION 1..10: note = Synthetic
WASYLGAGTY

SEQ ID NO: 597 - protein, 6 aa, synthetic construct
  REGION 1..6: note = Synthetic
SKEGGL

SEQ ID NO: 598 - protein, 10 aa, synthetic construct
  REGION 1..10: note = Synthetic
FASVFDAGTY

SEQ ID NO: 599 - protein, 10 aa, synthetic construct
  REGION 1..10: note = Synthetic
FASLFDAGTY

SEQ ID NO: 600 - protein, 16 aa, synthetic construct
  REGION 1..16: note = Synthetic
ASDGPWRATTPDAYDY

SEQ ID NO: 601 - protein, 5 aa, synthetic construct
  REGION 1..5: note = Synthetic
YSNQY

SEQ ID NO: 602 - protein, 11 aa, synthetic construct
  REGION 1..11: note = Synthetic
ATRCTVVPGIT

SEQ ID NO: 603 - protein, 6 aa, synthetic construct
  REGION 1..6: note = Synthetic
WIPPIP

SEQ ID NO: 604 - protein, 11 aa, synthetic construct
  REGION 1..11: note = Synthetic
ATRCTVVPGIT

SEQ ID NO: 605 - protein, 21 aa, synthetic construct
  REGION 1..21: note = Synthetic
AARRSDFTGDYAYSGRSAYDY

SEQ ID NO: 606 - protein, 9 aa, synthetic construct
  REGION 1..9: note = Synthetic
RGRAGERVY

SEQ ID NO: 607 - protein, 18 aa, synthetic construct
  REGION 1..18: note = Synthetic
AAKYGGSLSYMHPTGYTY

SEQ ID NO: 608 - protein, 16 aa, synthetic construct
  REGION 1..16: note = Synthetic
AASKANMPALPANYDY

SEQ ID NO: 609 - protein, 6 aa, synthetic construct
  REGION 1..6: note = Synthetic
WIPPIP

SEQ ID NO: 610 - protein, 6 aa, synthetic construct
  REGION 1..6: note = Synthetic
WIPPIP

SEQ ID NO: 611 - protein, 17 aa, synthetic construct
  REGION 1..17: note = Synthetic
ATTRVWPTQHQMGQIEY

SEQ ID NO: 612 - protein, 12 aa, synthetic construct
  REGION 1..12: note = Synthetic
VADWQYGSTWNY

SEQ ID NO: 613 - protein, 17 aa, synthetic construct
  REGION 1..17: note = Synthetic
AAASSSSRLLEPIGYNY

SEQ ID NO: 614 - protein, 14 aa, synthetic construct
  REGION 1..14: note = Synthetic
AGNLKRSETSYYWK

SEQ ID NO: 615 - protein, 15 aa, synthetic construct
  REGION 1..15: note = Synthetic
TADRHEWGRLMKGDY

SEQ ID NO: 616 - protein, 20 aa, synthetic construct
  REGION 1..20: note = Synthetic
AATSRSLTSAMTREIRAYDY

SEQ ID NO: 617 - protein, 9 aa, synthetic construct
  REGION 1..9: note = Synthetic
RGRAGMEVY

SEQ ID NO: 618 - protein, 11 aa, synthetic construct
  REGION 1..11: note = Synthetic
ATRCTVVPGIS

SEQ ID NO: 619 - protein, 17 aa, synthetic construct
  REGION 1..17: note = Synthetic
AAASSSSRPLEPIGYNY

SEQ ID NO: 620 - protein, 19 aa, synthetic construct
  REGION 1..19: note = Synthetic
AAGNTGPFNLLHSSAQYAY

SEQ ID NO: 621 - protein, 11 aa, synthetic construct
  REGION 1..11: note = Synthetic
ATRCTVVPGIS

SEQ ID NO: 622 - protein, 6 aa, synthetic construct
  REGION 1..6: note = Synthetic
WIPPLP

SEQ ID NO: 623 - protein, 12 aa, synthetic construct
  REGION 1..12: note = Synthetic
AARYDMDYEYKT

SEQ ID NO: 624 - protein, 10 aa, synthetic construct
  REGION 1..10: note = Synthetic
FASVVDAGTY

SEQ ID NO: 625 - protein, 20 aa, synthetic construct
  REGION 1..20: note = Synthetic
AAQGRILRGRGLFKASDYDY

SEQ ID NO: 626 - protein, 11 aa, synthetic construct
  REGION 1..11: note = Synthetic
RLSRYYNSNIY

SEQ ID NO: 627 - protein, 13 aa, synthetic construct
  REGION 1..13: note = Synthetic
KAELYTLQHNYEY

SEQ ID NO: 628 - protein, 11 aa, synthetic construct
  REGION 1..11: note = Synthetic
HLSRYYNSNIY

SEQ ID NO: 629 - protein, 14 aa, synthetic construct
  REGION 1..14: note = Synthetic
LAEERPYYGGPLEY

SEQ ID NO: 630 - protein, 10 aa, synthetic construct
  REGION 1..10: note = Synthetic
FANIVDRPVS

SEQ ID NO: 631 - protein, 10 aa, synthetic construct
  REGION 1..10: note = Synthetic
FASVLGAGTY

SEQ ID NO: 632 - protein, 11 aa, synthetic construct
  REGION 1..11: note = Synthetic
RLSRYYNSNIY

SEQ ID NO: 633 - protein, 5 aa, synthetic construct
  REGION 1..5: note = Synthetic
NAGDY

SEQ ID NO: 634 - protein, 10 aa, synthetic construct
  REGION 1..10: note = Synthetic
YVDPLGRVPR

SEQ ID NO: 635 - protein, 10 aa, synthetic construct
  REGION 1..10: note = Synthetic
FASVLGAGTY

SEQ ID NO: 636 - protein, 7 aa, synthetic construct
  REGION 1..7: note = Synthetic
NAPSLGY

SEQ ID NO: 637 - protein, 10 aa, synthetic construct
  REGION 1..10: note = Synthetic
FASALGAGVY

SEQ ID NO: 638 - protein, 10 aa, synthetic construct
  REGION 1..10: note = Synthetic
FASIIDAGTY

SEQ ID NO: 639 - protein, 16 aa, synthetic construct
  REGION 1..16: note = Synthetic
AARSGGSYTYTGSYHY

SEQ ID NO: 640 - protein, 16 aa, synthetic construct
  REGION 1..16: note = Synthetic
AANRYGSSSYQGQYAS

SEQ ID NO: 641 - protein, 16 aa, synthetic construct
  REGION 1..16: note = Synthetic
AAQQWPDPRNPNGYDY

SEQ ID NO: 642 - protein, 16 aa, synthetic construct
  REGION 1..16: note = Synthetic
AAAKAGHWGRDANYDY

SEQ ID NO: 643 - protein, 16 aa, synthetic construct
  REGION 1..16: note = Synthetic
AAAKAGQWGRDAKYDY

SEQ ID NO: 644 - protein, 21 aa, synthetic construct
  REGION 1..21: note = Synthetic
TADLKGLWALGLPGHYASWDS

SEQ ID NO: 645 - protein, 9 aa, synthetic construct
  REGION 1..9: note = Synthetic
RARRGWAIY

SEQ ID NO: 646 - protein, 16 aa, synthetic construct
  REGION 1..16: note = Synthetic
AADSGGSWGRGTTYDY

SEQ ID NO: 647 - protein, 17 aa, synthetic construct
  REGION 1..17: note = Synthetic
AAYNTAGWGEPHQSYRY

SEQ ID NO: 648 - protein, 15 aa, synthetic construct
  REGION 1..15: note = Synthetic
AGRRSVVVRSFDYDY

SEQ ID NO: 649 - protein, 9 aa, synthetic construct
  REGION 1..9: note = Synthetic
NVNWALHDS

SEQ ID NO: 650 - protein, 16 aa, synthetic construct
  REGION 1..16: note = Synthetic
AANSGGHWWRGATYDY

SEQ ID NO: 651 - protein, 9 aa, synthetic construct
  REGION 1..9: note = Synthetic
NVNWALHDS

SEQ ID NO: 652 - protein, 17 aa, synthetic construct
  REGION 1..17: note = Synthetic
AAYNTANWGQPHQSYRH

SEQ ID NO: 653 - protein, 12 aa, synthetic construct
  REGION 1..12: note = Synthetic
NVVTYGSNRRDF

SEQ ID NO: 654 - protein, 16 aa, synthetic construct
  REGION 1..16: note = Synthetic
AANRYGSSSYQGQYGS

SEQ ID NO: 655 - protein, 16 aa, synthetic construct
  REGION 1..16: note = Synthetic
AANRYGSSSYQGQYDY

SEQ ID NO: 656 - protein, 9 aa, synthetic construct
  REGION 1..9: note = Synthetic
NVNWALQDS

SEQ ID NO: 657 - protein, 9 aa, synthetic construct
  REGION 1..9: note = Synthetic
RARRGWAIY

SEQ ID NO: 658 - protein, 21 aa, synthetic construct
  REGION 1..21: note = Synthetic
AADLTGLWALGLPGHYASWDS

SEQ ID NO: 659 - protein, 10 aa, synthetic construct
  REGION 1..10: note = Synthetic
QLGRTVLDYF

SEQ ID NO: 660 - protein, 16 aa, synthetic construct
  REGION 1..16: note = Synthetic
AAAKAGQWGRYANYDY

SEQ ID NO: 661 - protein, 16 aa, synthetic construct
  REGION 1..16: note = Synthetic
AANPYGSSSYQGQYGS

SEQ ID NO: 662 - protein, 16 aa, synthetic construct
  REGION 1..16: note = Synthetic
AANRYGSSSYQGQYGS

SEQ ID NO: 663 - protein, 16 aa, synthetic construct
  REGION 1..16: note = Synthetic
AAAKAGHWGRDANYDY

SEQ ID NO: 664 - protein, 10 aa, synthetic construct
  REGION 1..10: note = Synthetic
YVDRRGAVPT

SEQ ID NO: 665 - protein, 10 aa, synthetic construct
  REGION 1..10: note = Synthetic
YVDRRDVVPT

SEQ ID NO: 666 - protein, 10 aa, synthetic construct
  REGION 1..10: note = Synthetic
YADRFSGSPT

SEQ ID NO: 667 - protein, 10 aa, synthetic construct
  REGION 1..10: note = Synthetic
FANVISGPVY

SEQ ID NO: 668 - protein, 16 aa, synthetic construct
  REGION 1..16: note = Synthetic
AASRQGNPYAQTSYDY

SEQ ID NO: 669 - protein, 14 aa, synthetic construct
  REGION 1..14: note = Synthetic
NALVSRRDSAAYFA

SEQ ID NO: 670 - protein, 9 aa, synthetic construct
  REGION 1..9: note = Synthetic
KARKDSHDY

SEQ ID NO: 671 - protein, 13 aa, synthetic construct
  REGION 1..13: note = Synthetic
NAHIREYYSTYDY

SEQ ID NO: 672 - protein, 14 aa, synthetic construct
  REGION 1..14: note = Synthetic
NALFNPIDGPARYY

SEQ ID NO: 673 - protein, 14 aa, synthetic construct
  REGION 1..14: note = Synthetic
TALFNPVDGTARYY

SEQ ID NO: 674 - protein, 14 aa, synthetic construct
  REGION 1..14: note = Synthetic
NAASSTWPPRDYDY

SEQ ID NO: 675 - protein, 14 aa, synthetic construct
  REGION 1..14: note = Synthetic
NADERPYYGDSVLS

SEQ ID NO: 676 - protein, 10 aa, synthetic construct
  REGION 1..10: note = Synthetic
YADRFSGSPT

SEQ ID NO: 677 - protein, 18 aa, synthetic construct
  REGION 1..18: note = Synthetic
AADADRSTTIYSRDIYDY

SEQ ID NO: 678 - protein, 16 aa, synthetic construct
  REGION 1..16: note = Synthetic
AASRQGLPYVETSYDY

SEQ ID NO: 679 - protein, 10 aa, synthetic construct
  REGION 1..10: note = Synthetic
YVDRRDEVPT

SEQ ID NO: 680 - protein, 18 aa, synthetic construct
  REGION 1..18: note = Synthetic
AADGNPAKLVLDQYGMDY

SEQ ID NO: 681 - protein, 10 aa, synthetic construct
  REGION 1..10: note = Synthetic
YVDQRGVVPT

SEQ ID NO: 682 - protein, 17 aa, synthetic construct
  REGION 1..17: note = Synthetic
AAYNTAGWGEPHQSYRY

SEQ ID NO: 683 - protein, 15 aa, synthetic construct
  REGION 1..15: note = Synthetic
NAEVHVWGVPGPRDY

SEQ ID NO: 684 - protein, 16 aa, synthetic construct
  REGION 1..16: note = Synthetic
AANPYGSSSYQGQYAS

SEQ ID NO: 685 - protein, 9 aa, synthetic construct
  REGION 1..9: note = Synthetic
NVNWALHDS

SEQ ID NO: 686 - protein, 16 aa, synthetic construct
  REGION 1..16: note = Synthetic
AAATAGHWGRDANYDY

SEQ ID NO: 687 - protein, 9 aa, synthetic construct
  REGION 1..9: note = Synthetic
NVNWALHDS

SEQ ID NO: 688 - protein, 16 aa, synthetic construct
  REGION 1..16: note = Synthetic
AANPYGSSSYQGQYGS

SEQ ID NO: 689 - protein, 9 aa, synthetic construct
  REGION 1..9: note = Synthetic
TMVWGLRYY

SEQ ID NO: 690 - protein, 9 aa, synthetic construct
  REGION 1..9: note = Synthetic
NVNWALHDS

SEQ ID NO: 691 - protein, 16 aa, synthetic construct
  REGION 1..16: note = Synthetic
AANPYGSSSYQGQYGS

SEQ ID NO: 692 - protein, 9 aa, synthetic construct
  REGION 1..9: note = Synthetic
NVNWALHDS

SEQ ID NO: 693 - protein, 9 aa, synthetic construct
  REGION 1..9: note = Synthetic
NVNWALHDS

SEQ ID NO: 694 - protein, 9 aa, synthetic construct
  REGION 1..9: note = Synthetic
NVNWALHDS

SEQ ID NO: 695 - protein, 124 aa, synthetic construct
  REGION 1..124: note = Synthetic
QVQLQESGGGLVQAGGSLRLSCAASGRSLSTVSMGWFRQAPGKEREFVAAIAWSGGRTTYADSVKGRFTISRDNATNTVYLQMNSLKPEDTAVYYCAGYRGVLFITTKSAYDYWGQGTQVTVSS

SEQ ID NO: 696 - protein, 117 aa, synthetic construct
  REGION 1..117: note = Synthetic
QVQLQESGGGLVQPGGSLRLSCAASGFTFSSYWMYWVRQAPGKGLEWVSSISTGGTSTYYTDSVKGRFTISRDNAKNTLYLQMNSLKPEDTALYYCAKLVAYGMDYWGKGTLVTVSS

SEQ ID NO: 697 - protein, 120 aa, synthetic construct
  REGION 1..120: note = Synthetic
QVQLQESGGGLVQAGDSLRLSCATSGRTFSRYTMGWFRQTPGKEREFVAAISWSGTYYTDSVKGRFTISRDNAKNTVYLQMNSLKPEDTAVYYCAVGSRRLYYSSDINYWGQGTQVTVSS

SEQ ID NO: 698 - protein, 120 aa, synthetic construct
  REGION 1..120: note = Synthetic
QVQLQQSGGGLVQAGDSLRLSCATSGRTFSSYTMGWFRQTPGKEREFVAAISWSGTYYTDSVKGRFTISRDNAKNTVYLQMNSLKPEDTAVYYCVVGSRRLYYSSDINYWGQGTQVTVSS

SEQ ID NO: 699 - protein, 120 aa, synthetic construct
  REGION 1..120: note = Synthetic
QVQLQESGGGLVQAGDSLRLSCATSERTFSRYTMGWFRQTPGKEREFVAAISWSGTYYTDSVKGRFTISTDNAKRTVYLQMNNLKPEDTAVYYCAQGSRRLYYSSDIDYWGQGTQVTVSS

SEQ ID NO: 700 - protein, 120 aa, synthetic construct
  REGION 1..120: note = Synthetic
QVQLQESGGGLVQAGGSLRLSCTASGFIVNSYWMHWFRQAPGKGLEWVAAISTNAYSTYYADSVRGRFTTSRANAENTPYLEMNNLKPEDAALYYCARGGTAQEGGMDYWGQGTLITVSS

SEQ ID NO: 701 - protein, 120 aa, synthetic construct
  REGION 1..120: note = Synthetic
QVQLQESGGGLVQAGDSLRLSCATSGHDFSKYTMGWFRQTPGKEREFVAAISWSGTYYTDSVKGRFTISRDNAKNTVYLQMNSLKPEDTAVYYCAVGSRRLYYSSDIDYWGQGTQVTVSS

SEQ ID NO: 702 - protein, 120 aa, synthetic construct
  REGION 1..120: note = Synthetic
QVQLQQSGGGLVQAGDSLRLSCATSGFTFSRYTMGWFRQTPGKEREFVAAISWSGTYYTDSVKGRFTISRDNAKNTVYLQMNSLKPEDTAVYYCASGSRRLYYSSDIDYWGQGTQVTVSS

SEQ ID NO: 703 - protein, 120 aa, synthetic construct
  REGION 1..120: note = Synthetic
QVQLQESGGGLVQAGDSLRLSCATSGRTFSRYTMGWYRQTPGKEREFVAAISWSGTYYTDSVKGRFTISIDNAKNTVYLQMNSLKPEDTAVYYCASGSRRLYYSSDIDYWGQGTQVTVSS

SEQ ID NO: 704 - protein, 120 aa, synthetic construct
  REGION 1..120: note = Synthetic
QVQLQQSGGGLVQAGDSLRLSCATSGRTFSRYTMGWFRQSPGKEREFVAAISWSGTYYTDSVKGRFTISRDNANNTVYLQMNSLKPEDTAVYYCVVGSRRLYYSSDIDYWGQGTQVTVSS

SEQ ID NO: 705 - protein, 120 aa, synthetic construct
  REGION 1..120: note = Synthetic
QVQLQQSGGGLVQAGDSLRLSCATSGRDFSRYTMGWFRQTPGKEREFVAAISWSGTYYTDSVNGRFTISRDNAKNTVYLQMNSLKPEDTAVYYCAVGSRRLYYSSDIDYWGQGTQVTVSS

SEQ ID NO: 706 - protein, 120 aa, synthetic construct
  REGION 1..120: note = Synthetic
QVQLQESGGGLVQAGDSRRLSCATSGGTFSSYTMGWFRQTPGKEREFVAAISWSGTYYADSVKGRFTISRDNAKNTVYLQMNSLKPEDTAVYYCAVGSRRLYYSSDINYWGQGTQVTVSS

SEQ ID NO: 707 - protein, 123 aa, synthetic construct
  REGION 1..123: note = Synthetic
QVQLQESGGGLVQAGGSLRLSCAASGRTFSSYAMGWFRQAPGKEREFVGALSGSGATTDYADFVKSRFTISRDNAKNTVYLQMRDLKAEDTAVYYCAASGHFGLRGTYNYEYWGQGTQVTVSS

SEQ ID NO: 708 - protein, 119 aa, synthetic construct
  REGION 1..119: note = Synthetic
QVQLQESGGELVQAGDSLRLSCAVSGRTGIKWTMAWFRQAPGKEREFVARITWSGDTVYADSMKGRFTISRDNAKNTMYLQMNRLKPEDTAVYTCAADRIYNEDRYYYWGQGTQVTVSS

SEQ ID NO: 709 - protein, 116 aa, synthetic construct
  REGION 1..116: note = Synthetic
QVQLQESGGGLVQAGGSLRLSCAASGSIFRIIAMAWYRQAPGKQRELVAAITNGGATMYADAVKGRFTISRDTAKNTAYLQMNSLKLEDTAVYYCAADHFGRTPYWGQGTQVTVSS

SEQ ID NO: 710 - protein, 120 aa, synthetic construct
  REGION 1..120: note = Synthetic
QVQLQESGGGLVQAGDSLRLSCATSGRTFSSYTMGWFRQTPGKEREFVAAISWSGTYYTDSVKGRFTISRDNAKNTVYLQMNSLKPADTAVYYCAVGSRRLYYSSDIDYWGQGTQVTVSS

SEQ ID NO: 711 - protein, 123 aa, synthetic construct
  REGION 1..123: note = Synthetic
QVQLQQSGGGLVQAGGSLRLSCAASSRTFSNYAMAWFRQTPGKEREFLATISGVTAFTIYADSVKGRFTISRDNAKNTLYLQMNSLKAEDTAVYYCAARQWNPTMRERDYDYWGQGTEVTVSS

SEQ ID NO: 712 - protein, 120 aa, synthetic construct
  REGION 1..120: note = Synthetic
QVQLQESGGGLVQTGDSLRLSCATSGRSFSRYTMGWFRQTPGKEREFVAAISWSGTYYTDSVKGRFTISRDNAKNTVYLQMNSLKPEDTAIYYCAVGTRRLYYSSDIDYWGQGTQVIVSS

SEQ ID NO: 713 - protein, 120 aa, synthetic construct
  REGION 1..120: note = Synthetic
QVQLQQSGGGLVQAGDSLRLSCATSGLTVSRYTMGWFRQTPGKEREFVATISWSGTYYTDSVKGRFTISRDDAKNMIYLQMNSLKPEDTAVYYCAAGSRRLHYSSDIDYWGQGTQVTVSS

SEQ ID NO: 714 - protein, 120 aa, synthetic construct
  REGION 1..120: note = Synthetic
QVQLQESGGGLVQAGDSLRLSCATSGLTFSRYTMGWFRQTPGKEREFVAAISWSGTYYSDSVKGRFTISRDNAKNTHYLQMNSLKPEDTAVYYCVVGSRRLYYSSDINYWGQGTQVTVSS

SEQ ID NO: 715 - protein, 116 aa, synthetic construct
  REGION 1..116: note = Synthetic
QVQLQESGGGLVQAGGSLRLSCAASGTGRRFGYMAWYRQPPGKEREMVATISRAGATNYADSVKDRFTISRDNIKNTVYLQMNSLKPDDTAVYYCFASVFDAGTYWGQGTQVTVSS

SEQ ID NO: 716 - protein, 123 aa, synthetic construct
  REGION 1..123: note = Synthetic
QVQLQESGGGLVQAGGSLRLSCAASGSIFSINVMGWYRQAPGKQRELVADATSGGMTNYADSVKGRFTISRDNAKNTVYLQMNSLKPEDTAVYYCNAAQSRTSRLFPDEYDYWGQGTQVTVSS

SEQ ID NO: 717 - protein, 123 aa, synthetic construct
  REGION 1..123: note = Synthetic
QVQLQESGGGLVQAGGSLRLSCTASGRDFSTYVMGWFRQAPGKEREFVAASNWNDGGTYYADSVKGRFTISRDNAKNTVYLQMNSLKPEDTAVYFCAARSGGSYTYTGSYHYWGQGTQVTVSS

SEQ ID NO: 718 - protein, 124 aa, synthetic construct
  REGION 1..124: note = Synthetic
QVQLQESGGGLVQAGGPLRLSCAASGRTLYNNAMGWFRQAPGKEREFVAGISSSGISTDYADSVKGRFTISRDNAKNTVYLQMKSLKSADTALYYCAASRAATVGVTPQEYAYWGPGTQVTVSS

SEQ ID NO: 719 - protein, 128 aa, synthetic construct
  REGION 1..128: note = Synthetic
QVQLQESGGGLVQPGATLRLSCAVSGRTISNYGVGWFRQAPGKEREFVGVSWSASSTVYADSMKGRFAISRDNVKNTVSLQMNSLRPEDTAIYYCAMMGASYCAGYRCHHAAQTYDYWGQGTQVTVSS

SEQ ID NO: 720 - protein, 127 aa, synthetic construct
  REGION 1..127: note = Synthetic
QVQLQESGGGLVQAGGSLTLSCAASGPPSRRYDMGWFRQAPGKEREFVAAVSWTGSSTYYSDSVKGRFTISRDGVKNTVYLQMNSLKSEDTAVYYCAVKNTYGSSSYYYTSSSYDYWGQGTQVTVSS

SEQ ID NO: 721 - protein, 126 aa, synthetic construct
  REGION 1..126: note = Synthetic
QVQLQESGGGLVQAGGSLRLSCTVAGEIDSAAGMAWFRQAPGKERELVAAVTWDGGTTRYKDSVKGRFTISRDHAKNTVLLQMNSLKPEDTAVYYCAAGNTGPFNLLYSSAQYLYWGQGTQVTVSS

SEQ ID NO: 722 - protein, 124 aa, synthetic construct
  REGION 1..124: note = Synthetic
QVQLQESGGGLVQAGGSLRLSCAASGSMFSIHDMSWVRQAPGKQREVVATVSSDGTTNYAESVKGRFTVSRDNAKITAYLQMNSLKLEDTGVYYCMGNLRRLDSGYADSYYYKTGQGIQVTVSS

SEQ ID NO: 723 - protein, 119 aa, synthetic construct
  REGION 1..119: note = Synthetic
QVQLQQSGGGLVQAGGSLRLSCAASGRTADRYAISWFRQAPGEERDFVARIERSGGATVYANSVKGRFTISRDNAKNLVYLQMNSLKPEDTAVYYCAARLALAGEYDYWGQGTQVTVSS

SEQ ID NO: 724 - protein, 121 aa, synthetic construct
  REGION 1..121: note = Synthetic
QVQLQESGPGLVKPSQTLSLTCTVSGGSIRTDRYYWSWIRQPPGKGLEWMGAIAWTASTFYNPSLKSRTSISRDTSGNQFTLQLSSVTPEDTAVYYCVPIVGDSSWSGGSWGQGTQVTVSS

SEQ ID NO: 725 - protein, 119 aa, synthetic construct
  REGION 1..119: note = Synthetic
QVQLQESGGGLVQAGGSLRLSCAVSGIIFSINAMGWYRQAPGKQREYVAGITGRGRTNYVDSVKGRFTISRDNARNTVYLQMNSLKPEDTGVYYCNEARNGLGSPANSWGQGTQVTVSS

SEQ ID NO: 726 - protein, 122 aa, synthetic construct
  REGION 1..122: note = Synthetic
QVQLQESGGGLVQVGGSLRLSCAASGSIFSIYTMGWYRQAPGNEREMVATITSGGTTNYADSVQGRFTITTSRDNAKNTVYLQMNSLKPEDTAVYSCNALVNQRDGLATYYWGQGTQVTVSS

SEQ ID NO: 727 - protein, 119 aa, synthetic construct
  REGION 1..119: note = Synthetic
QVQLQESGGGLVQAGGSLRLSCAASGSISSISGMGWYRQAPGRQRALVATITSYGSTDYEDSVKGRFTISRDNAKNTVYLQMNSLKPEDTGVYYCHAVQGSTWWGSGSWGQGTQVTVSS

SEQ ID NO: 728 - protein, 119 aa, synthetic construct
  REGION 1..119: note = Synthetic
QVQLQQSGGGLVQAGGSHRLSCAASKSIGSIHRMGWYRQAPGKERELVAIITNGGSTNHRDSVRGRFTISADVAKNTVYLQMNSLKPEDTAVYYCYANIREYYSSYEYWGQGTQVTVSS

SEQ ID NO: 729 - protein, 126 aa, synthetic construct
  REGION 1..126: note = Synthetic
QVQLQESGGGLVRAGDSLTLSCAASGRTFSSYAMGWFRQAPGKEREFVAAINRSGGTTSYVEPVKGRFTISRDNAKNTVYLQMNSLKPEDTAVYYCAADRVGDDYYYISSQHYDYWGQGTQVTVSS

SEQ ID NO: 730 - protein, 111 aa, synthetic construct
  REGION 1..111: note = Synthetic
QVQLQESGGGLVQAGGSLRLSCTISGTRGSINPVAWSRQAPGKQREPIAFISTGGATIYGDSAKGRFTISRDNAKNTVYLQMSNLKPEDSGVYYCNTESYRGQGTQVTVSS

SEQ ID NO: 731 - protein, 124 aa, synthetic construct
  REGION 1..124: note = Synthetic
QVQLQQSGGGLVQAGDSLRLSCTASGRTFNGKGMAWFRQAPGKEREFVAGINWSGDSTSYGDSVKGRFTISRDDAKNTVYLQMNSLKLEDTAVYYCAVSTYSTYWFTPARYDYWGQGTQVTVSS

SEQ ID NO: 732 - protein, 118 aa, synthetic construct
  REGION 1..118: note = Synthetic
QVQLQESGGGLVQAGGSLRLSCLASGMTFSDHAMGWYRQAPGKQRELVAIIGRGGTTTYFDSVKGRFTISKDNAKNTLYLQMNSLKPEDTAVYYCNVVPLRAGIDTYWGQGTQVTVSS

SEQ ID NO: 733 - protein, 116 aa, synthetic construct
  REGION 1..116: note = Synthetic
QVQLQESGGGLVQAGGSLRLSCAASGSGRRVGYMAWYRQTPGKQRELVATISRAGATKYEDSVKDRFTISRDNAKNTVYLQMNSLKPDDTAVYYCFASIIDAGTYWGQGTQVTVSS

SEQ ID NO: 734 - protein, 116 aa, synthetic construct
  REGION 1..116: note = Synthetic
QVQLQESGGGLVEPGGSLRLSCAASGIISSITYMGWYRQAPGKQRELVALIARSGATRYADSVKDRFTISRDDAKNTVYLQMNNLKAEDTALYYCYIDQRDVVPTWGQGTQVTVSS

SEQ ID NO: 735 - protein, 115 aa, synthetic construct
  REGION 1..115: note = Synthetic
QVQLQESGGGLVQPGGSLRLSCAASQSIFRINAMGWYRHTPGKPRELVALITSGGVTTYADYVKGRFTISGDNAKNTVYLQMNSLKPEDTAVYECHARSWSADYWGQGTQVTVSS

SEQ ID NO: 736 - protein, 113 aa, synthetic construct
  REGION 1..113: note = Synthetic
QVQLQQSGGGLVQTGGSLRLSCAASGIMLRDEALGWYRQAPGRQREMVAIITRGGATNYFGSVKGRFTISRDNAKNTVYLQMNSLKPEDTAVYFCRIIGTDTWGQGTQVTVSS

SEQ ID NO: 737 - protein, 118 aa, synthetic construct
  REGION 1..118: note = Synthetic
QVQLQESGGGLVQPGGSLRLSCAASGDTISSYTMAWFRQAPGKDREFVASITWSGEVTYYADSVKGRFTISRDNAKNTLYLQMNSLKPEDTAVYYCAAGRAGTNWNYWGQGTQVTVSS

SEQ ID NO: 738 - protein, 114 aa, synthetic construct
  REGION 1..114: note = Synthetic
QVQLQESGGGLVQAGGSLRLSCAASRIISSITDMGWYRQPPGQRELVASISRGGRIDYADSVKGRFSISRDNAQNAVYLQMNSLKPEDTDVYYCSALSSGKYYWGQGTQVTVSS

SEQ ID NO: 739 - protein, 120 aa, synthetic construct
  REGION 1..120: note = Synthetic
QVQLQESGGGPVQAGGSLRLSCAASAPLNSIHAMRWFRQVPGKQREMVATSTNGGSTNYHESVKGRFTISRDNAKNAVYLEMNSLKPEDSAVYYCYAEVRHYSGNVDQYWGQGTQVTVSS

SEQ ID NO: 740 - protein, 115 aa, synthetic construct
  REGION 1..115: note = Synthetic
QVQLQQSGGGLVQAGGSLRLSCAASGRIFGINGWYWYRQAPGKRRELVASLYRSGGTNYLDSVKGRFIISRDNAKNTVYLQMNDLKPEDTAVYYCNVNWAESDSWGQGTQVTVSS

SEQ ID NO: 741 - protein, 126 aa, synthetic construct
  REGION 1..126: note = Synthetic
QVQLQESGGGSVQAGGSLRLSCAASRGTFSNLGLAWFRQAPGKEREFVAALKRDGNRTYYADSMKGRFTISRDNAKNTVYLQMNSLKPEDTAVYYCAARLPRPNAVVDTTSEYDYWGQGTQVTVSS

SEQ ID NO: 742 - protein, 115 aa, synthetic construct
  REGION 1..115: note = Synthetic
QVQLQESGGGLVQAGGSVRLSCVASGRTFNMAWFRQGPGNEREFVASISGSGGITHVADSVKGRFTISRDTDKNTLYLHMDSLKPEDTAVYYCAVARFGGAWVYGGQGTQVTVSS

SEQ ID NO: 743 - protein, 117 aa, synthetic construct
  REGION 1..117: note = Synthetic
QVQLQQSGGGLVQPGGSLRLSCAASGRTFSDLGMGWFRQAPGKEREFVAQILSGTTRPVYGDSVEGRFTISTDSAKNTVYLRMNRLEPEDTAVYYCAARTVGGLPIWGPGTQVTVSS

SEQ ID NO: 744 - protein, 115 aa, synthetic construct
  REGION 1..115: note = Synthetic
QVQLQESGGGLVQAGGSLRLSCTASDTIFSSNGMYWYRQALGKRRELVASLYRDGNTAYADSVKGRFTISRDNAKNMVWLQMNSLKPEDTAVYYCNINWPLHDSWGQGTQVTVSS

SEQ ID NO: 745 - protein, 126 aa, synthetic construct
  REGION 1..126: note = Synthetic
QVQLQESGGGSVQAGDSLRLSCAVSRGTFNNYGLAWFRQAPGKEREFVASLTRLGGRTYYADSVKGRFTISRDNAKNTVYLQMNSLKPEDTAVYYCAARLPRTNAVVDDISEYTYWGHGTQVTVSS

SEQ ID NO: 746 - protein, 126 aa, synthetic construct
  REGION 1..126: note = Synthetic
QVQLQQSGGGSVQAGGSLRLSCAASRGTFNNLGMAWFRQAPGKEREFVAALKRDGIRTYYGDSMKGRCTISRDNAKITVYLQMNSLKSEDTAVYYCAARLPRTNAVVDSTSEYDYWGQGTQVTVSS

SEQ ID NO: 747 - protein, 115 aa, synthetic construct
  REGION 1..115: note = Synthetic
QVQLQQSGGGLVQAGGSLRLSCAASGRIFGINGWYWYRQAPGKRRELVVSLYRSGGTNYLDSVKGRFIISRDNAKNTVYLQMNDLKPEDTAVYYCNVNWAESDSWGQGTQVTVSS

SEQ ID NO: 748 - protein, 119 aa, synthetic construct
  REGION 1..119: note = Synthetic
QVQLQESGGGLVQAGGSLRLSCVASGSPLSINVMGWYRQTPGKQRELVASITSGGQTRYAESVKGRFTISRDGGKNTVVLQMNSLNFEDAAVYYCNARDATYYVEYNYWGQGTQVTVSS

SEQ ID NO: 749 - protein, 121 aa, synthetic construct
  REGION 1..121: note = Synthetic
QVQLQESGGGLVQAGGSLRLSCAASARTFSDYAMGWFRQPPGEGREFVAGIRENGGRTEYADSVKGRFTVSRDNVKNTMYLQMNNLKPDDTAIYYCAAGRDRYLRFSPDYWGQGTQVTVSS

SEQ ID NO: 750 - protein, 111 aa, synthetic construct
  REGION 1..111: note = Synthetic
QVQLQQSGGGLVQAGGSLRLSCAVSGTIGSINPVAWSRQAPGKQREPIAFISTAGATIYGDSAKGRFTISRDNAKNTVYLQMSNLKPEDSAVYYCNTESYRGQGTQVTVSS

SEQ ID NO: 751 - protein, 125 aa, synthetic construct
  REGION 1..125: note = Synthetic
QVQLQESGGGPVQAGGSLRLSCAYSGRTFSGYGMGWFRQAAGKERTWVGTITWNEGSTYYARSVRGRFTISRDNAKNTVYLQMDSLKPEDTAVYYCAASTAGYGLGSSPNEYEYWGQGTQVTVSS

SEQ ID NO: 752 - protein, 124 aa, synthetic construct
  REGION 1..124: note = Synthetic
QVQLQESGGGLVQAGDSLRLSCTASGRTFTRYGMGWFRQAPGKEREFVAGINGRGDSTSYGDSVKGRFTISRDDAKNTVYLQMNSLKLEDTAVYYCAVSFTSTFWFSPAQYDYWGQGTQVTVSS

SEQ ID NO: 753 - protein, 117 aa, synthetic construct
  REGION 1..117: note = Synthetic
QVQLQESGGGLVQAGGSLRLSCAVSGSLFSFETMRWYRQAHGKQREWVAIITTGASPAYADSVKGRFTISRDNAKNTVYLQMFSLKPEDTAVYYCYVRERVGSKEYWGQGTQVTVSS

SEQ ID NO: 754 - protein, 121 aa, synthetic construct
  REGION 1..121: note = Synthetic
QVQLQESGGGLVQPGGSLRLSCAASGLIFSASPMGWYRQAPGNQREFVARISASGMITKYADSVKGRFTVSRDDAKNTVYLQMNNLKPEDTAVYYCNAPRANSDWPRENSWGQGTQVTVSS

SEQ ID NO: 755 - protein, 124 aa, synthetic construct
  REGION 1..124: note = Synthetic
QVQLQQSGGGLVQPGGSLRLSCAASGFTLSSYYIGWFRQAPGKEREGVSCFSNSDGNIAFADSVKGRFTVSRDNAKRMVYLQMTSLKLEDTAVYYCAVGYACDYHELRQRFSSWGQGTQVTVSS

SEQ ID NO: 756 - protein, 120 aa, synthetic construct
  REGION 1..120: note = Synthetic
QVQLQQSGGGLVQPGGSLRLSCAASRSISSIQAMGWYRQAPGKQRELVARITNGGTTRYADSVRGRFTISRDNAKNTVYLQMNSLKPEDTAVYYCNADERPYYGDAINSWGHGTQVTVSS

SEQ ID NO: 757 - protein, 111 aa, synthetic construct
  REGION 1..111: note = Synthetic
QVQLQQSGGGLVQPGGSLRLSCAASGFAFDTSPMRWARQAPGKGLEWVSTIFSDGSTHYVDSVKGRFTISRDNAKNMVFLQMNSLKTEDTAVYYCAMSGVRGQGTQVTVSS

SEQ ID NO: 758 - protein, 123 aa, synthetic construct
  REGION 1..123: note = Synthetic
QVQLQQSGGGLVQPGGSLRLSCAASGFTLDTYAVGWFRQAPGKEREEVSCISASGSMTTYAPFVKGRFTISKNNVRNMVDLQMNSLKPEDTAVYYCAASTRPLCSRGGNYDYWGQGTQVTVSS

SEQ ID NO: 759 - protein, 123 aa, synthetic construct
  REGION 1..123: note = Synthetic
QVQLQESGGGLVQPGGSLRLSCAASGFTLDYSAIGWFRQAPGKEREDVSCISSSGAYTSYVGSVKGRFSISRDNAKNTVFLQMNSLKPEDTAVYYCAARSGVCSRSSSDFGSWGQGTQVTVSS

SEQ ID NO: 760 - protein, 124 aa, synthetic construct
  REGION 1..124: note = Synthetic
QVQLQQSGPGLVKPSQTLSLTCTVSGGSITTNPYYWSWIRQPPGKGLEWIGYIDYSGSTYYSPSLRSRTTISRDTSKNQFTLQLSSVTPGDTAVYYCARSLRPVVTAKRDDEYWGQGTQVTVSS

SEQ ID NO: 761 - protein, 127 aa, synthetic construct
  REGION 1..127: note = Synthetic
QVQLQESGGGLVQPGGSLRLSCAASGSIFSINAMGWFRQAPRKEREFVATINWSGGITYYADSVKGRFTISRDNAKNTVYLQMNSLKPDDTAIYYCAADLRVGASGPISFAWAYDYWGQGTQVTVSS

SEQ ID NO: 762 - protein, 127 aa, synthetic construct
  REGION 1..127: note = Synthetic
QVQLQESGGGLVQPGGSLRLSCAASGFSLDNYDIGWFRQAPGKEREGVGCISRSGGTTTYAGSVSRRFTISRDNAKNTVYLQMNSLKPEDTGVYYCAPVDITGPGRCPPARYEYGYWGQGTQGTASS

SEQ ID NO: 763 - protein, 111 aa, synthetic construct
  REGION 1..111: note = Synthetic
QVQLQQSGGGLVQPGGSLRLSCAASGFAFDRSAMRWARQAPGKGLEWVSSIFSDGSTHYVPSVEGRFTISRDNPKNMVYLQMNSLKPEDTAVYYCATSGIRGQGTQVTVSS

SEQ ID NO: 764 - protein, 111 aa, synthetic construct
  REGION 1..111: note = Synthetic
QVQLQESGGGLVQPGESLRLSCAASGFAFDSSAMRWARQAPGKGLEWLCSIFKDGSTYYVDSVKGRFTISRDNAKNMVYLQMNSLKPEDTAVYYCATSGIRGQGTQVTVSS

SEQ ID NO: 765 - protein, 122 aa, synthetic construct
  REGION 1..122: note = Synthetic
QVQLQESGGGLVQAGGSLRLSCAASGIGPNAIGWFRQAPGKERDFVAGISRSGGYTNYAASVKDRFTISRDDAKNTVYLQMTNLSPEDTAIYTCAADAGNFPSRNPVTYGYWGQGTQVTVSS

SEQ ID NO: 766 - protein, 111 aa, synthetic construct
  REGION 1..111: note = Synthetic
QVQLQQSGGGLVQPGGSLRLSCAASGFAFDRSPMRWARQAPGKGLEWISSIFSDGSTYYVDSVEGRFTISRDNDKNMVYLQMNSLKPEDTAVYYCATSGIRGQGTQVTVSS

SEQ ID NO: 767 - protein, 131 aa, synthetic construct
  REGION 1..131: note = Synthetic
QVQLQESGGGLVQPGGSLRLSCAASGFTLDYYAIGWFRQAPGKEREGVSCISSSGAYENYAGFVKGRFTISRDNAKNTVYLQMNNLKPEDTAVYYCAAARGGCPPNTYYSGSSYFWEYDFWGQGTQVTVSS

SEQ ID NO: 768 - protein, 127 aa, synthetic construct
  REGION 1..127: note = Synthetic
QVQLQESGGGLVQPGGSLRLSCAASGFNLNYYDIGWFRQAPGKEREGVSCISRSGGTETYAPSVKGRFTISRDNAKNTVYLQMNSLEPEDTGVYYCAPVDITGPGRCPPARYAYGSWGQGIQVTVSS

SEQ ID NO: 769 - protein, 111 aa, synthetic construct
  REGION 1..111: note = Synthetic
QVQLQESGGGLVQPGESLRLSCAASGFAFDSSPMRWARQAPGKGLEWLCSIFKDGSTYYVDSVKGRFTISRDNAKNMVYLQMNSLKPEDTAVYYCATSGIRGQGTQVTVSS

SEQ ID NO: 770 - protein, 111 aa, synthetic construct
  REGION 1..111: note = Synthetic
QVQLQESGGGLVQPGESLRLSCAASGFAFDSSPMRWARQAPGKGLEWMCTIFKDGTTYYVDSVKGRFTISRDNAKNMVYLQMNSLKPEDTAVYYCAMSGVRGQGTQVTVSS

SEQ ID NO: 771 - protein, 111 aa, synthetic construct
  REGION 1..111: note = Synthetic
QVQLQQSGGGLVQPGESLRLSCAASGFAFDTSPMRWARQAPGKGLEWLCSIFKDGSTYYVDSVKGRFTISRDNAKNMVYLQMNSLKPEDTAVYYCATSGIRGQGTQVTVSS

SEQ ID NO: 772 - protein, 122 aa, synthetic construct
  REGION 1..122: note = Synthetic
QVQLQQSGGGLVQPGGSLRLSCAASGFNLDNYHIGWFRQAPGKEREGVSCISSSGGLTTYAPFVKGRFTISRDNAKNTVFLQMSSLKPEDTAVYYCGRVNYCARDMSAYDTWGQGTQVTVSS

SEQ ID NO: 773 - protein, 123 aa, synthetic construct
  REGION 1..123: note = Synthetic
QVQLQQSGGGLVQPGGSLRLSCAASGFTRDYYTIGWFRQAPGKEREGVSCISSSDGWTYYADSVKGRFTISRDNAKNTVYLQMNSLKPEDTAVYYCAAAYDTAGWGAGGMDYWGKGTLVTVSS

SEQ ID NO: 774 - protein, 127 aa, synthetic construct
  REGION 1..127: note = Synthetic
QVQLQQSGGGLVQAGGSLRLSCAASGSIFSINAMGWFRQAPGKEREFVGAITWSGGSTEYADHVKGRFTISRDNAKNTVYLQMNSLKPEDTAIYYCAADTRRWAGGSSWYGEEYDYWGQGTQVTVSS

SEQ ID NO: 775 - protein, 123 aa, synthetic construct
  REGION 1..123: note = Synthetic
QVQLQQSGGGLVQPGGSLRLSCEASGFTLDYYTIGWFRQAPGKEREEVSCISRSGAMTTYAGSVKGRFTISRDNAKKTVYLQMNSLKPEDTGIYYCAATVKSVCFRGELYDYWGQGTQVTVSS

SEQ ID NO: 776 - protein, 124 aa, synthetic construct
  REGION 1..124: note = Synthetic
QVQLQESGGGVVQPGGSLRLSCAASEFSLANYAIGWFRQAPGKEREAVSCISSSGNYMTYEPFVKGRFTISRDNAKNAVYLQMNSLEPEDTAVYYCARARSGCSRNMYDSTDYWGQGTQVTVSS

SEQ ID NO: 777 - protein, 132 aa, synthetic construct
  REGION 1..132: note = Synthetic
QVQLQQSGGGLVQPGGSLTLSCAASGFTLDYYAIGWFRQAPGKEREGVSCISSSDGSTYYADSVKGRFTISRDNAKNTVYLQMNSLKPEDTAVYYCAAIGSGPLTAQGMCVMTRTPRDYDYWGQGTQVTVSS

SEQ ID NO: 778 - protein, 111 aa, synthetic construct
  REGION 1..111: note = Synthetic
QVQLQESGGGLVQPGGSLRLSCAASGFAFDRSPMRWARQAPGKGLEWVSSSLPDGSTYYIDSVKGRFTISRDNVKNMVYLQMNSLKPEDTAVYYCATSGVRGQGTQVTVSS

SEQ ID NO: 779 - protein, 111 aa, synthetic construct
  REGION 1..111: note = Synthetic
QVQLQQSGGGLVQPGGSLRLSCAASGFAFDRSAMRWARQAPGKGLEWVSSIFSDGTTHYVPSVEGRFTISRDNPKNMVYLQMNSLKPEDTAVYYCATSGIRGQGTQVTVSS

SEQ ID NO: 780 - protein, 126 aa, synthetic construct
  REGION 1..126: note = Synthetic
QVQLQESGGGLVQLGGSLRLSCAASGFTFDSYVMTWVRQAPGKGLEWVSYISQGGGATYYADSVKGRFTISRDNNKNTLYLQMNSLKPEDTAVYYCAKGGLADGTGFYGSPGALIRGQGTQVTVSS

SEQ ID NO: 781 - protein, 126 aa, synthetic construct
  REGION 1..126: note = Synthetic
QVQLQESGGGLVQPGGSLRLSCVASGFTFNTYVMTWVRQAPGKGLEWVSYISQGGAATYYTDSVKGRFTISRDNAKNTVYLQMNSLKPEDTAVYYCAQGGLADGSGFYGSPGALIRGQGTQVTVSS

SEQ ID NO: 782 - protein, 123 aa, synthetic construct
  REGION 1..123: note = Synthetic
QVQLQESGGGLVQPGGSLRLSCAASGFTLDYYAIGWFRQAPGKEREGVSCIMSSDGYTYYADSVKGRFTISRDNAKNTVYLQMNSLKPEDTAVYYCAAAYDTAGWGADGMDYWGKGTLVTVSS

SEQ ID NO: 783 - protein, 111 aa, synthetic construct
  REGION 1..111: note = Synthetic
QVQLQESGGGLVQPGESLRLSCAASGFAFDTSPMRWARQAPGKGLEWLCSIFEDGTTYYVDSVKGRFTISRDNAKNMVYLQMNSLKPEDTAVYYCATSGIRGQGTQVTVSS

SEQ ID NO: 784 - protein, 127 aa, synthetic construct
  REGION 1..127: note = Synthetic
QVQLQESGGGLVQPGGSLRLSCAASGSIFSINGMGWFRQAPGKEREFVAAISWSGSITYYADSVKGRFTISRDNAKNTVLLQMNSLKPEDTAIYYCAADIRVGASGPISFAWAYDYWGQGTQVTVSS

SEQ ID NO: 785 - protein, 132 aa, synthetic construct
  REGION 1..132: note = Synthetic
QVQLQESGGGLVQPGGSLRLSCAASGFILDYYAIGWFRQAPGKEREGVSCISSSDGSTYYADSVKGRFTISRDNAKNTVYLQMNSLKPEDTAVYYCAAVGSGPLSAQGMCVMTRTSRDADYWGQGTQVTVSS

SEQ ID NO: 786 - protein, 123 aa, synthetic construct
  REGION 1..123: note = Synthetic
QVQLQESGGGLVQPGGSLRLSCLASGFTLDGYAIGWFRQAPGKEREGVSCISPSGGMTTYAGFVKGRFTISRDNAKNTVYLQMNSLKPEDTGVYYCKVMPLCDRMWSPLGGSWGQGTQVTVSS

SEQ ID NO: 787 - protein, 123 aa, synthetic construct
  REGION 1..123: note = Synthetic
QVQLQESGGGLVQPGGSLRLSCAASGFTLEAYAIGWFRQAPGKEREEVSCISRSGGLTTYAGFVKGRFTISRDNAKNTAYLQMNSLNPEDTALYYCAAKQTQCSRWNPEYEYWGQGTQVFVSS

SEQ ID NO: 788 - protein, 111 aa, synthetic construct
  REGION 1..111: note = Synthetic
QVQLQESGGGLVQPGGSLKLSCAASGFTFEASAMRWARQAPGKGLEYVSSIFSDGTTYYVDSVKGRFTISRDNDKNMVYLQMNNLKPEDTAVYYCATSGIRGRGTQVTVSS

SEQ ID NO: 789 - protein, 124 aa, synthetic construct
  REGION 1..124: note = Synthetic
QVQLQESGPGLVKPSQTLSLTCTVSGGSITTNSYYWSWIRQPPGKGLEWIGYIDYSGSTYYSPSLRSRTTISRDTSKNQFTLQLSSVTPGDTAVYYCARSLRPVVTAKRDDEYWGQGTQVTVSS

SEQ ID NO: 790 - protein, 126 aa, synthetic construct
  REGION 1..126: note = Synthetic
QVQLQESGGGLVQLGGSLRLSCAASGFTFDAYVMTWVRQAPGKGLEWVSYISQGGAATYYADSVKGRFTISRDNNKNTLYLQMNSLKPEDTAVYYCAKGGLADGSGFYGSPGALIRGQGTQVTVSS

SEQ ID NO: 791 - protein, 111 aa, synthetic construct
  REGION 1..111: note = Synthetic
QVQLQESGGDLVQPGGSLRLSCAASGFAFEASAMRWARQAPGKGLEYVSSIFSDGTTYYVDSVKGRFTISRDNDKNMVYLQMNNLKPEDTAVYYCATSGIRGRGTQVTVSS

SEQ ID NO: 792 - protein, 124 aa, synthetic construct
  REGION 1..124: note = Synthetic
QVQLQESGPGLVKPSQTLSLTCTVSGGSITTNSYYWSWIRQPPGKGLEWIGYIDYSGNTYYSPPLRSRTSISRDTSKNQFTLQLSSVTPEDTAVYYCARSVRPVVTAKGDNEYWGQGTQVTVSS

SEQ ID NO: 793 - protein, 111 aa, synthetic construct
  REGION 1..111: note = Synthetic
QVQLQESGGGLVQPGGSLRLSCAASGFAFDTSPMRWARQAPGKGLEWVSTSFSDGTTHYVDSVKGRFTISRDNAKNMVYLQMNSLKPEDTAVYYCATSGIRGQGTQVTVSS

SEQ ID NO: 794 - protein, 124 aa, synthetic construct
  REGION 1..124: note = Synthetic
QVQLQESGPGLVKPSQTLSLTCTVSGGSITTNTYYWSWIRQPPGKGLEWIGYIDYSGSTYYSPSLRSRTTISRDTSKNQFTLQLSSVTPEDTAVYYCARSVRPVVTAKSDDEYWGQGTQVTVSS

SEQ ID NO: 795 - protein, 124 aa, synthetic construct
  REGION 1..124: note = Synthetic
QVQLQESGPGLVKPSQTLSLTCTVSGGSITTNSYYWSWIRQPPGKGLEWIGYIDYSGNTYYSPPLRSRTSISRDTSKNQFTLQLSSVTPEDTAVYYCARSVRPVVTAKSDNEYWGQGTQVTVSS

SEQ ID NO: 796 - protein, 124 aa, synthetic construct
  REGION 1..124: note = Synthetic
QVQLQESGPGLVKPSQTLSLTCTVSGGSITTNSYYWSWIRQPPGKGLEWIGYIDYSGNTYYSPPLRSRTSISRDTSKNQFTLQLSSVTPEDTAVYYCARSVRPVVTAKRDNEYWGQGTQVTVSS

SEQ ID NO: 797 - protein, 111 aa, synthetic construct
  REGION 1..111: note = Synthetic
QVQLQESGGGLVQPGGSLRLSCAASGFAFDSSAMRWARQAPGKGLEWVSSILSDGSTYYVDSVKGRFTISRDNVKNMVYLQMNSLKPEDTAVYYCATSGIRGQGTLVTVSS

SEQ ID NO: 798 - protein, 111 aa, synthetic construct
  REGION 1..111: note = Synthetic
QVQLQESGGGLVQPGESLRLSCAASGFAFDSSPMRWARQAPGKGLEWLCSIFGDGSTYYVDSVKGRFTISRDNAKNMVYLQMNSLKPEDTAVYYCAMSGVRGQGTQVTVSS

SEQ ID NO: 799 - protein, 127 aa, synthetic construct
  REGION 1..127: note = Synthetic
QVQLQESGGGLVQPGGSLRLACVGSGFTLDYYDIGWFRQAPGKEREGVSCIEGSGGSTNYADSVKGRFTISRDNAKNTVYLQMNSLKPDDTAVYYCAVASSGSIGLCTVGRNAYNYWGQGTQVTVSS

SEQ ID NO: 800 - protein, 122 aa, synthetic construct
  REGION 1..122: note = Synthetic
QVQLQESGGGLVQPGRSLRLSCVASGISRNAIGWFRQAPGKERDFVAGISRSGGYTNYENFVKGRFTISRDDAKNTVYLQMTNLKPEDTAIYTCAADAGNFPSRNPVTYGYWGQGTQVTVSS

SEQ ID NO: 801 - protein, 132 aa, synthetic construct
  REGION 1..132: note = Synthetic
QVQLQQSGGGLVQPGGSLRLSCAASGFTLDYYAIGWFRQAPGKEREGVSCISSSDGSTYYADSVKGRFTISRDNAKNTVYLQMNSLKPEDTAVYYCAAVGSGPLSAQGMCVMTRTPRDYDYWGQGTQVTVSS

SEQ ID NO: 802 - protein, 111 aa, synthetic construct
  REGION 1..111: note = Synthetic
QVQLQESGGGLVQPGESLRLSCAASGFAFDSSAMRWARQAPGKGLEYVCSIFEDGSTYYVDSVKGRFTISRDNAKNMVYLQMNSLKPEDTAVYYCTTSGIRGQGTQVTVSS

SEQ ID NO: 803 - protein, 124 aa, synthetic construct
  REGION 1..124: note = Synthetic
QVQLQQSGPGLVKPSQTLSLTCTVSGGSITTNHYYWSWIRQPPGKGLEWIGYIDYSGSTYYSPPLRSRTSISRDTSKNQFTLQLSSVTPEDTAVYYCARSVRPVVTAKRDDENWGQGTQVTVSS

SEQ ID NO: 804 - protein, 111 aa, synthetic construct
  REGION 1..111: note = Synthetic
QVQLQESGGGLVQPGESLRLSCAASGFAFDKSAMRWARQAPGKGLEYVCSVFEDGSTYYVDSVKGRFTISRDNAKNMVYLQMNSLKPEDTAVYYCTTSGIRGQGTQVTVSS

SEQ ID NO: 805 - protein, 123 aa, synthetic construct
  REGION 1..123: note = Synthetic
QVQLQESGGGLVQPGGSLRLSCAASGFTLEAYDIGWFRQAPGKEREEISCISRSAGHTTYAGFVKGRFTISRDNAKNTAYLQMNSLNPEDTALYYCAAGQTQCTRWSSEYEYWGQGTQVTVSS

SEQ ID NO: 806 - protein, 111 aa, synthetic construct
  REGION 1..111: note = Synthetic
QVQLQESGGGLVQPGESLRLSCAASGFTFDRSPMRWARQAPGKGLEYLCTIFEDGTTYYVDSVKGRFTISRDNAKNMVYLQMNNLKPEDTAVYYCAMSGVRGQGTQVTVSS

SEQ ID NO: 807 - protein, 123 aa, synthetic construct
  REGION 1..123: note = Synthetic
QVQLQESGGGLVQPGGSLRLSCAASGFTLENYAIGWFRQAPGKEREGVSCISASGSTTTYEGFVKGRFTISRDNAKNTIYLQMNALEPEDTAVYYCARTHQLCPRARSPYDAWGQGTQVTVSS

SEQ ID NO: 808 - protein, 123 aa, synthetic construct
  REGION 1..123: note = Synthetic
QVQLQESGGGLVQPGGSLRLSCAASGFTLDYYTIGWFRQAPGKEREGVSCIMTSDDYTYYADSVKGRFTISRDSATNTVYLQMNSLKPEDTAVYYCAAAYDTAGWGADGMDYWGKGTLVTVSS

SEQ ID NO: 809 - protein, 121 aa, synthetic construct
  REGION 1..121: note = Synthetic
QVQLQESGGGLVQPGGSLRLSCAASGSIFSIKDMGWYRQPPGKQRELVARITTGGTTTYADSVKGRFTISRDNAKNTVYLQMNNLKPEDTDVYYCGVLLNYRGPSSASYHWGQGTQVTVSS

SEQ ID NO: 810 - protein, 115 aa, synthetic construct
  REGION 1..115: note = Synthetic
QVQLQESGGGLVQPGGSLRLSCAASRSIFSINVMGWYRQAPGKQRELVAHITRGGSTYYYVDSVKGRFTISRDNAKTMVYLQMNSLKPEDTAVYYCNAVPARDRWGQGTQVTVSS

SEQ ID NO: 811 - protein, 120 aa, synthetic construct
  REGION 1..120: note = Synthetic
QVQLQESGGGLVQPGGSLRLSCAASGFTFSRAAMIWVRQAPGKGLEWVSVIDSDGGTTRYADSVKGRFTISRDNAKNTLYLQMNNLKPEDTAVYYCSLFRGYSAYDLRSPGQGTQVTVSS

SEQ ID NO: 812 - protein, 115 aa, synthetic construct
  REGION 1..115: note = Synthetic
QVQLQESGGGLVQPGGSLRLSCAASRSIVSDNVMGWYRQAPGKQRELVAHITRGGSTYYFVDSVKGRFTISRDNAKTMVYLQMNSLKPEDTAVYYCNTVPARDRWGQGTQVTVSS

SEQ ID NO: 813 - protein, 127 aa, synthetic construct
  REGION 1..127: note = Synthetic
QVQLQESGGGLVQAGGSLRLSCAASGRTFSRYGMGWFRQAPGKDREFVAAISWSGDSTYYADSVKGRFTISRDNAKNTVYLQMNSLKPEDTAVYYCAASYNPGTIATIRREYEYDYWGQGTQVTVSS

SEQ ID NO: 814 - protein, 124 aa, synthetic construct
  REGION 1..124: note = Synthetic
QVQLQESGGGLVQAGGSLRLSCAASGRTYSSYAMGWFRQAPGKEREFVAAISWSGGSTYYADSVKGRFTISRDNAKNTVYLQMNSLKPEDTAVYYCAADRRTHVSDRLGEYDYWGQGTQVTVSS

SEQ ID NO: 815 - protein, 125 aa, synthetic construct
  REGION 1..125: note = Synthetic
QVQLQESGGGLVQPGGSLRLSCAASGRTFSSYAMGWFRQAPGKEREFVAAISWSDEDTYYADSVKGRFTISRDNAENTVYLQMNSLKPEDTAVYYCAADRSYTVMVRQMRGMDYWGKGTLVTVSS

SEQ ID NO: 816 - protein, 114 aa, synthetic construct
  REGION 1..114: note = Synthetic
QVQLQESGGLVQPGGSLRLSCAASRSIVSINVMGWYRQAPGKQRELVAHITRGGSTYYYVDSVKGRFTISRDNAKTMVYLQMNSLKPEDTAVYYCNTVPARDRWGQGTQVTVSS

SEQ ID NO: 817 - protein, 115 aa, synthetic construct
  REGION 1..115: note = Synthetic
QVQLQESGGGLVQPGGSLRLSCAASRSIFSINVWGWYRQAPGKQRELVAHITRGGSTYYYVDSVKGRFTISRDNAKTMVYLQMNSLKPEDTAVYYCNTVPARDHWGQGTQVTVSS

SEQ ID NO: 818 - protein, 127 aa, synthetic construct
  REGION 1..127: note = Synthetic
QVQLQQSGGGLVQAGGSLRLSCAASGRTFSRYGMGWFRQAPGKEREFVAAISWSGDSTYYADSVKGRFTISRDNAKNTVYLQMNSLKPEDMGVYYCAASYNPGNIATIRREYEYDYWGQGTQVTVSS

SEQ ID NO: 819 - protein, 127 aa, synthetic construct
  REGION 1..127: note = Synthetic
QVQLQESGGGLVQAGGSLRLSCAASGRTFSRYGMGWFRQAPGKEREFVAAISWSGGSTYYADSVKGRFTISRDNAKNTVYLQMNSLKPEDTAVYYCAASYNPGNIATISREYEYDYWGQGTQVTVSS

SEQ ID NO: 820 - protein, 127 aa, synthetic construct
  REGION 1..127: note = Synthetic
QVQLQESGGGLVQAGGSLRLSCAASGRTFSRYGMGWFRQAPGKEREFVAAISWSGGSTYYADSVKGRFTISRDNAKNTVYLQMNSLKPEDTAVYYCAASYNPGTIATIRREYEYDYWGQGTQVTASS

SEQ ID NO: 821 - protein, 123 aa, synthetic construct
  REGION 1..123: note = Synthetic
QVQLQQSGGGLVQAGGSLRLSCAASGRTFSSYAMAWFRQAPGKEREFVAAIRSGNSTYYADSVKGRFTISRDNAKNTVYLQMNSLKPEDTAVYYCAADVVTHLATRFYEYDYWGQGTQVTVSS

SEQ ID NO: 822 - protein, 124 aa, synthetic construct
  REGION 1..124: note = Synthetic
QVQLQESGGRLVQAGGSLRLSCAASGRTFSSYAMGWFRQAPGKEREFVALISWSGGSTYYADSVKGRFTISRDNAKNTVYLQMNSLKPEDTAVYYCAADRLTHYSDYPADFGSWGQGTQVTVSS

SEQ ID NO: 823 - protein, 124 aa, synthetic construct
  REGION 1..124: note = Synthetic
QVQLQQSGGGLVQAGGSLRLSCAASGRTFSSYAMGWFRQAPGKEREFVALISWSGSNTYYADSVKGRFTISRDNAKNTAYLQMNSLKPEDTAVYYCAADRLTHYSDYPADFDSWGQGTQVTVSS

SEQ ID NO: 824 - protein, 115 aa, synthetic construct
  REGION 1..115: note = Synthetic
QVQLQESGGGLVQPGGSLRLSCAASRSIFSANVMGWYRQAPGKQRELVAHITRGSSTYYFLDSVKGRFTISRDNAKNIVYLQMNSLKPEDTAVYYCNLVPARDRWGQGTQVTVSS

SEQ ID NO: 825 - protein, 123 aa, synthetic construct
  REGION 1..123: note = Synthetic
QVQLQESGGGLVQPGGSLRLSCAAAGSIFSIRDMGWYRQAPGKQRERELVATISSGGSTSYADFVKDRFTISRDNAKNTVYLQMNDLRPEDTAIYYCSVLTNPGWNRPLAYFWGQGTQVTVSS

SEQ ID NO: 826 - protein, 122 aa, synthetic construct
  REGION 1..122: note = Synthetic
QVQLQESGGGLVQAGGSLRLSCAASGPTFSSYAMYAMAWFRQAPGKQREFVASVSLTDGSKNYRDSVKGRFTISIDNANNTVYLQMNSLKPEDTAVYYCAGDLDSDVGYEHWGQGTQVTVSS

SEQ ID NO: 827 - protein, 124 aa, synthetic construct
  REGION 1..124: note = Synthetic
QVQLQESGGGLVQAGGSLRLSCAASGRTFSSYAMGWFRQAPGKEREFVALISWSGSNTYYADSVKGRFTISRDNAKNTAYLQMNSLKPEDTAVYYCAADRLTHYSDYPADFGSWGQGTQVTVSS

SEQ ID NO: 828 - protein, 127 aa, synthetic construct
  REGION 1..127: note = Synthetic
QVQLQQSGGGLVQAGGSLRLSCAASGRTFSRYGMGWFRQAPGKEREFVAAISWSGGSTYYADSVKGRFTISRDNAKNTVYLQMNSLKPEDTAVYYCAASYNPGNIATIRREYEYDYWGQGTQVTVSS

SEQ ID NO: 829 - protein, 115 aa, synthetic construct
  REGION 1..115: note = Synthetic
QVQLQQSGGGLVQPGGSLRLSCAASRSIFSINVMGWYRQAPGKQRELVAHITRGGSTYYYVDSVKGRFTISRDIAKTMVYLQMNSLKPEDTAVYYCNTVPARDRWGQGTQVTVSS

SEQ ID NO: 830 - protein, 125 aa, synthetic construct
  REGION 1..125: note = Synthetic
QVQLQQSGGGSVQAGGSLRLSCAASGRAFSTYTMGWFRQAPGKEREFVAAISWTGGSTYYADSVKGRFTISRDNAKAAIYLQMNSLKPEDTAVYYCAEKARTAVDVRVTSGYDYWGQGTQVTVSS

SEQ ID NO: 831 - protein, 115 aa, synthetic construct
  REGION 1..115: note = Synthetic
QVQLQESGGGLVQPGGSLRLSCAASGRIFSINVMGWYRQAPGKQRELVAHITRGGSTYYFVDSVKGRFTISRDNAKTMVYLQMNSLKPEDTAVYYCNTVPARDRWGQGTQVTVSS

SEQ ID NO: 832 - protein, 121 aa, synthetic construct
  REGION 1..121: note = Synthetic
QVQLQESGGGLVQAGGSLRLTCAASGITFSSYAMSWFRQAPGKEREFVAAISTSGGSTYYADSVKGRFTISRDNAKNTVYLQMNSLKPEDTAVYYCTARWDYPNTYEYDYSGQGTQVTVSS

SEQ ID NO: 833 - protein, 115 aa, synthetic construct
  REGION 1..115: note = Synthetic
QVQLQESGGGLVQPGGSLTLSCAASGGIFSFNVMGWYRQAPGKQRELVAHITRGGSTYYYVDSVKGRFTISRDNAKTMVYLQMNSLKPEDTAVYYCNTVPARDRWGQGTQVTVSS

SEQ ID NO: 834 - protein, 120 aa, synthetic construct
  REGION 1..120: note = Synthetic
QVQLQESGGGLVQAGESLKLSCTEASGHTFSSYIMGWFRRTPGKQREIVAGIRWSSGTTYYADSVKGRFTISRDNAKNTVYLQMNSLKPEDTAVYYCAADAGRDSIYDYWGQGTQVTVSS

SEQ ID NO: 835 - protein, 123 aa, synthetic construct
  REGION 1..123: note = Synthetic
QVQLQESGGGLVQAGGSLRLSCAASGRTFSSYAMAWFRQAPGKEREFVAVIRSGDSTYYADSVKGRFTISRDNAKNTVYLQMNSLKPEDTAVYYCAADVVTHIATRFYEYDYWGQGTQVTVSS

SEQ ID NO: 836 - protein, 124 aa, synthetic construct
  REGION 1..124: note = Synthetic
QVQLQQSGGGLVQAGGSLRLSCAASGRTFSSYAMGWFRQAPGKEREFVALISWSGASTYYADSVKGRFTISRDNAENTVYLQMNSLKPDDTAVYYCAADRLTHYSDYPRDFGSWGQGTQVTVSS

SEQ ID NO: 837 - protein, 115 aa, synthetic construct
  REGION 1..115: note = Synthetic
QVQLQESGGGLVQPGGSLRLSCATSRSIFRENVMGWYRQAPGKQRELVAHITRGSSTYYFVDSVKGRFTISRDNAKNIVYLQMNSLKPEDTAVYYCNLVPARDPWGQGTQVTVSS

SEQ ID NO: 838 - protein, 124 aa, synthetic construct
  REGION 1..124: note = Synthetic
QVQLQESGGGLVQAGGSLRLSCAASGRTFSMYTMGWFRQAPGKKREFVATISGSAGSTYYADSVKGRFTISRDTAKTTVYLQMNILKPEDTAVYYCAASEATHGTNRQLDYDYWGQGTQVTVSS

SEQ ID NO: 839 - protein, 127 aa, synthetic construct
  REGION 1..127: note = Synthetic
QVQLQESGGGLVQAGGSLRLSCAASGGTFSRYGMGWFRQAPGKEREFVAAISWSGDSTYYADSVKGRFTISRDNAKNTVHLQMNSLKPEDMGVYYCAASYNPGNIATIRREYEYDYWGQGTQVTVSS

SEQ ID NO: 840 - protein, 127 aa, synthetic construct
  REGION 1..127: note = Synthetic
QVQLQQSGGGLVQAGGSLRLSCAASGGTFSRYGMGWFRQAPGKEREFVAAISWSGDSTYYADSVKGRFTISRDNAKNTVYLQMNSLKPEDTAVYYCAASYNPGTIATIRREYEYDYWGQGTQVTVSS

SEQ ID NO: 841 - protein, 127 aa, synthetic construct
  REGION 1..127: note = Synthetic
QVQLQESGGGLVQAGGSLRLSCVVSRGTFSRYGMGWFRQAPGKEREFVAAISWSGDSTYYADSVKGRFTISRDNAKNTVYLQMNSLKPEDTAVYYCAASYNPGTIPTIRREYEYDYWGQGTQVTVSS

SEQ ID NO: 842 - protein, 127 aa, synthetic construct
  REGION 1..127: note = Synthetic
QVQLQESGGGLVQAGGSLRLSCAASGRTFSRLGMGWFRQAPGKEREFVAAISWSGDMTYYADSVKGRFTISRDNAKNTVYLQMNSLKPEDTAVYYCGASYNPGTIATIRREYEYDYWGQGTQVTVSS

SEQ ID NO: 843 - protein, 127 aa, synthetic construct
  REGION 1..127: note = Synthetic
QVQLQESGGGLVQAGGSLRLSCAASGGTFSRYGMGWFRQAPGKEREFVAAISWSGDSKYYEDSVKGRFTISRDNAKNTVYLQMNSLKPEDTAVYYCAASYNPGNIATIRREYEYDYWGQGTQVTVSS

SEQ ID NO: 844 - protein, 127 aa, synthetic construct
  REGION 1..127: note = Synthetic
QVQLQESGGGLVQAGGSLRLSCAASGGTFSRYGMGWFRQAPGKEREFVAAISWSGDSTYYADSVKGRFTISRDNAKNTVYLQMNNLKPEDTAVYYCAASYNPGNIATIRREYEYDYWGQGTQVTVSS

SEQ ID NO: 845 - protein, 121 aa, synthetic construct
  REGION 1..121: note = Synthetic
QVQLQESGGGLVQPGGSLRLSCAASGSSGSIKDMGWYRQPPGKQRELVARISTGGTTTYADSVKGRFTISRDNAKNTVYLQMNNLKPEDTDVYYCSVLLNIRGPSSASYHWGQGTQVTVSS

SEQ ID NO: 846 - protein, 121 aa, synthetic construct
  REGION 1..121: note = Synthetic
QVQLQQSGGGLVQPGGSLRLSCAASGSSGSIKDMGWYRQPPGKQRELVARITTGGTTTYADSVKGRFTISRDNAKNTVYLQMNNLKPEDTDVYYCNVLLNYRGPSSASYHWGQGTQVTVSS

SEQ ID NO: 847 - protein, 118 aa, synthetic construct
  REGION 1..118: note = Synthetic
QVQLQESGGGLVQAGGSLRLSCVASGRSFSSYTMGWFRQAPGKEREFVTSVTWNGEVPYYADSVKGRFTISRDNAKNTVYLRMNSLKPEDSAVYYCAAGNPGRGYDYWGQGTQVTVSS

SEQ ID NO: 848 - protein, 127 aa, synthetic construct
  REGION 1..127: note = Synthetic
QVQLQESGGGLVQAGGSLRLSCAASGGTFSRYGMGWFRQAPGKEREFVAAISWSGGSTYYADSVKGRFTISRDNAKNTVSLQMNSLKPEDTAVYYCAASYNPGNIATIRREYEYDYWGQGTQVTVSS

SEQ ID NO: 849 - protein, 125 aa, synthetic construct
  REGION 1..125: note = Synthetic
QVQLQESGGGLVQAGGSLRLSCAASGRTFSNYAMGWFRQAPGKEREFVAAISRSGGSTYYADSVKGRFTISRDNAKNTVYLQMNSLKPEDTAVYYCAADSLRTHVSDRSYEYDSWGQGTQVTVSS

SEQ ID NO: 850 - protein, 127 aa, synthetic construct
  REGION 1..127: note = Synthetic
QVQLQESGGGLVQAGGSLRLSCAASGGTFSRYGMGWFRQAPGKEREFVAAISWSGDNTYYADSVKGRFTISRDNAKNTVYLQMNSLKPEDMGVYYCAASYNPGNIATIRREYEYDYWGQGTQVTVSS

SEQ ID NO: 851 - protein, 125 aa, synthetic construct
  REGION 1..125: note = Synthetic
QVQLQESGGGLVQAGGSLRLSCAASGRTFSSYAMGWFRQAPGKEREFVAAISRSGASTYYADSVKGRFTISRDNAKNTVYLQMDNLKPEDTAVYYCAADSLRTHVSHVSYEYDSWGQGTQVTVSS

SEQ ID NO: 852 - protein, 125 aa, synthetic construct
  REGION 1..125: note = Synthetic
QVQLQESGGGLVQAGGSLRLSCAASGRTFSSYAMGWFRQGPGKEREFVAAIARSGSSTYYADSVKGRFTISRDKAKNTVYLQMNSLKPEDTAVYYCAADSLRTHVSDRSDEYDYWGQGTQVTVSS

SEQ ID NO: 853 - protein, 127 aa, synthetic construct
  REGION 1..127: note = Synthetic
QVQLQESGGGLVQAGGSLRLSCAASGRTFSRYGMGWFRQAPGKDREFVAAISWSGDSTYYVDSVKGRFTISRDNAKNTVYLQMNSLKPDDTAVYYCGASYNPGNIATIRREYEYDYWGQGTQVTVSS

SEQ ID NO: 854 - protein, 126 aa, synthetic construct
  REGION 1..126: note = Synthetic
QVQLQQSGGGLVQAGDSLRLSCAASGRTFSHYAMGWFRQAPGKEREFVAAIRTSAGITRYGDSAEGRFTISSDNAKNTVYLQMNSLKPEDTAVYYCAIDDDYAYYPPSLLDRYDYWGQGTQVTVSS

SEQ ID NO: 855 - protein, 124 aa, synthetic construct
  REGION 1..124: note = Synthetic
QVQLQESGGGLVQAGGSLRLSCAASGRTASSAAMGWFRQAPGKEREFVAAISWSGGSTYYADSVKGRFTISRDNAKNTVYLQMNSLKPEDTAVYYCAADRRTHVSDRLGEYDYWGQGTQVTVSS

SEQ ID NO: 856 - protein, 125 aa, synthetic construct
  REGION 1..125: note = Synthetic
QVQLQESGGGLVQAGGSLRLSCAASGRTFSTYAMGWFRQAPGKEREFVAAISRSGASTYYGDSVKGRFTISRDNAKNTVYLQMDSLKPEDTAVYYCAADSLRTHVSHVSYEYDSWGQGTQVTVSS

SEQ ID NO: 857 - protein, 127 aa, synthetic construct
  REGION 1..127: note = Synthetic
QVQLQESGGGLVQAGGSLRLSCAASGRTLSRYGMGWFRQAPGKEREFVAAISWSGDRTYYADSVNGRFTISRDNAKNTVYLQMNSLKPEDMGVYYCAASYNPGNIATIRREYEYDYWGQGTQVTVSS

SEQ ID NO: 858 - protein, 127 aa, synthetic construct
  REGION 1..127: note = Synthetic
QVQLQESGGGLRQAGGSLRLSCAASGGTFSRYGLGWFRQAPGKEREFVAAISWSGDRTYYADSVKGRFTISRDNAKNTVYLQMNSLKPEDTAVYYCGASYNPGNIATIRREYEYDYWGQGTQVTVSS

SEQ ID NO: 859 - protein, 127 aa, synthetic construct
  REGION 1..127: note = Synthetic
QVQLQQSGGGLVQAGGSLRLSCAASEGTFSRYGMGWFRQAPGKEREFVAAISWSGDSTYYADSVKGRFTISRDNAKNTVYLQMNSLKPEDTAVYYCAASYNPGNIATIRREYEYDYWGQGTQVTVSS

SEQ ID NO: 860 - protein, 124 aa, synthetic construct
  REGION 1..124: note = Synthetic
QVQLQESGGGLVQAGGSLRLSCAASGRTFSMYTMGWFRQAPGKKREFVATISGSAGSTYYADSVKGRFTISRDTAKTTVYLQMNILKPEDTAVYYCASSTATHGTNRQLDYDYWGQGTQVTVSS

SEQ ID NO: 861 - protein, 124 aa, synthetic construct
  REGION 1..124: note = Synthetic
QVQLQESGGGLVQAGGSLRLSCAPSGRTFSTGAMGWFRQAPGKEREFVAAISWSGGSTYYADSVKGRFTISRDNAKNTVYLQMNSLKPEDTAVYYCAASLLTHVSDRALEYDYWGQGTQVTVSS

SEQ ID NO: 862 - protein, 127 aa, synthetic construct
  REGION 1..127: note = Synthetic
QVQLQQSGGGLVQAGGSLRLSCAASEGTFSRYGMGWFRQAPGKEREFVAAISWSGDRTYYTDSVKGRFTISRDNAKNTVYLQMNSLKPEDTAVYYCAASYNPGNIATIRREYEYDYWGQGTQVTVSS

SEQ ID NO: 863 - protein, 119 aa, synthetic construct
  REGION 1..119: note = Synthetic
QVQLQESGGGLVQPGGSLRLSCAASGSIFSINVMGWYRQAPGKQRELVAAATSGGQTKYAHSVKGRFTISRDNAKNTVYLQMNSLKPEDTAVYYCNGRSASYYPTYDYWGQGTQVTVSS

SEQ ID NO: 864 - protein, 128 aa, synthetic construct
  REGION 1..128: note = Synthetic
QVQLQLQESGGGLVQAGDSLRLSCAASGRTFSHYAMGWFRQAPGKEREFVAAIRGNAGITRYADSAEGRFTISTDNAKNTVYLQMNSLEPEDTAVYYCAIDLDYAYYPPSLVDRYDYWGQGTQVTVSS

SEQ ID NO: 865 - protein, 121 aa, synthetic construct
  REGION 1..121: note = Synthetic
QVQLQESGGGLVQPGGSLRLSCAASGSSGSMKDMGWYRQPPGKQRELVARITTGGTTTYADSVKGRFTISRDNAKNTVYLQMNNLKPEDTDVYYCNVLLNYRGPSSASYHWGQGTQVTVSS

SEQ ID NO: 866 - protein, 125 aa, synthetic construct
  REGION 1..125: note = Synthetic
QVQLQESGGGLVQAGGSLRLSCAASGRTFSHYAMGWFRQAPGKEREFAAAISRSGGSTYYADSVKGRFTISRDNAKNTVYLQMNSLKPEDTAVYYCAADSLRTHVSDRSYEYDSWGQGTQVTVSS

SEQ ID NO: 867 - protein, 125 aa, synthetic construct
  REGION 1..125: note = Synthetic
QVQLQESGGGLVQAGGSLRLSCAASGRTFSTYAMGWFRQAPGKEREFVAAISRSGGSTYYADSVKGRFTISRDKAKNTVYLQMNSLKPEDTAVYYCAADSLRTHVSDRSYEYDYWGQGTQVTVSS

SEQ ID NO: 868 - protein, 126 aa, synthetic construct
  REGION 1..126: note = Synthetic
QVQLQESGGGLVQPGGSLRLSCAASGSIFSSDDMGWYRQAPGKQRELVALITSGGMTKYEDFVKGRFTISRDNSKDTVSLQMNSLKPEDTAVYYCNAFRSKVVDGIILKRRDYDYWGQGTQVTVSS

SEQ ID NO: 869 - protein, 124 aa, synthetic construct
  REGION 1..124: note = Synthetic
QVQLQQSGGGLVQAGGSLRLSCAASGRTFSSYTMGWFRQAPGKEREFVATISGSAGSTYYADSVKGRFTISRDTAKTTVYLQMNILKPEDTAVYYCAASEATHGTNRQLDYDYWGQGTQVTVSS

SEQ ID NO: 870 - protein, 115 aa, synthetic construct
  REGION 1..115: note = Synthetic
QVQLQESGGGLVQAGGSLRLSCAASGSIFSDDIWGWYRQAPGKQRELVAHITRGSRPYYYVDSVKGRFTISRDNAKTMVYLQMNSLKPEDTAVYYCNAVPARDRWGQGTQVTVSS

SEQ ID NO: 871 - protein, 119 aa, synthetic construct
  REGION 1..119: note = Synthetic
QVQLQQSGGGLVQPGGSLRLSCAASGSIGSINVMGWYRQAPGNERELVAHVTSGGMTRYTESVKGRFTISRDGAKNTVYLQMNSLKPEDTAVYYCNGRSASYYPTYNYWGQGTQVTVSS

SEQ ID NO: 872 - protein, 126 aa, synthetic construct
  REGION 1..126: note = Synthetic
QVQLQQSGGGLVQAGGSLRLSCAASGDTLSRYGMAWFRQAPGKEREFVAAITWSGSSTYYADSVKGRFTISRDNAKNTVDLQMNSLKPKDTAVYYCAAGPNLGPITIMRDYEYDYWGQGTQVTVSS

SEQ ID NO: 873 - protein, 119 aa, synthetic construct
  REGION 1..119: note = Synthetic
QVQLQQSGGGLVQPGGSLRLSCAASGSIFSINVMGWYRQAPGKQRELVASITSGGKSRYADSVKGRFTISRDNGQNTVYLQMNSLKPEDTANYYCNGRSASYYPTYDYWGQGTQVTVSS

SEQ ID NO: 874 - protein, 119 aa, synthetic construct
  REGION 1..119: note = Synthetic
QVQLQQSGGGLVQPGGSLRLSCAASGSIGSINVMGWYRQAPGNERELVAHATSGGMTRYTDSVKGRFTISRDGAKNTVYLQMNNLKPEDTAVYYCNGRSASYYPTYNYWGQGTQVTVSS

SEQ ID NO: 875 - protein, 127 aa, synthetic construct
  REGION 1..127: note = Synthetic
QVQLQQSGGGLVQAGGSLRLSCAASGGTFSRYGMGWFRQAPGKEREFVAAISWSGDRTYYADSVKGRFTISRDNAKDTVYLQMNSLKPEDTAVYYCAASYNPGNIATIRREYEYDYWGQGTQVTVSS

SEQ ID NO: 876 - protein, 118 aa, synthetic construct
  REGION 1..118: note = Synthetic
QVQLQESGGGLVQAGGSLRLSCVVSGSTFSINRVAWFRQAPGKERQFVAGIRSNGITNYADSVKGRFTISSDNEKNTVYLQMNSLKPEDTAIYYCNDPLAPFSSDASWGQGTQVTVSS

SEQ ID NO: 877 - protein, 126 aa, synthetic construct
  REGION 1..126: note = Synthetic
QVQLQQSGGGLVQAGGSLRLSCAASGRTFSSYAMGWFRQAPGKEREFVASISWSGGITWYADSVKGRFTISRDNAKNTVYLQMNSLKPEDTAVYYCAADARSDSGSYYYPADFGSWGQGTQVTVSS

SEQ ID NO: 878 - protein, 126 aa, synthetic construct
  REGION 1..126: note = Synthetic
QVQLQESGGGLVQAGGSLRLSCAASGGTFSSYPMAWFRQAPGKEREFVAAISWSGGTTYYADSVKGRFTISRDNAKNTVYLQMNSLKPEDTAVYYCAAQSGPYGSSSSWEADFGSWGQGTQVTVSS

SEQ ID NO: 879 - protein, 120 aa, synthetic construct
  REGION 1..120: note = Synthetic
QVQLQESGGGLVQAGGSLRLSCTASGRTLSSYIMAWFRQAPGKEREFVAAIAWSGSVTQYADSVKGRFTISRDNAKNTAYLQMNSLKPEDTAVYYCAGDLHGIGYEYKYWGQGTQVTVSS

SEQ ID NO: 880 - protein, 128 aa, synthetic construct
  REGION 1..128: note = Synthetic
QVQLQESGGGLVQSGGSLRLSCAASGFSLDDYAIGWFRQAPGKEREGVSCISRTSDGSTYFADSVKGRFTISSDNAKNTVYLQMNSLKPEDTAVYYCAAGFVCSGYGGGIRGYEYDYWGQGTQVTVSS

SEQ ID NO: 881 - protein, 112 aa, synthetic construct
  REGION 1..112: note = Synthetic
QVQLQESGGGLVQPGGSLRLSCAFSGNIFSINLMTWYRQAPGKQREFVASITSGGNTNYVNFAKGRFTISTDNAKNTMYLQLNSLQPEDTAVYYCHCDWCSWGQGTQVTVSS

SEQ ID NO: 882 - protein, 124 aa, synthetic construct
  REGION 1..124: note = Synthetic
QVQLQESGGGLVQAGGSLRLSCAASGGTFSSYPMGWFRQAPGKEREFVAAISWSGGGTYYADSVKGRFTISRDNAKNTVYLQMNSLKPEDTAVYYCAADSPVGPSGLTTHWGYWGQGTQVTVSS

SEQ ID NO: 883 - protein, 126 aa, synthetic construct
  REGION 1..126: note = Synthetic
QVQLQESGGGLVQAGGSLRVSCAASGRTFSSYVMGWFRQAPGKEREFVAAISWSGGVTYYADSVKGRFTISRDNAKNTVYLQMNSLKPDDTAVYYCAADARSDSGRYYYPADFGSWGQGTQVTVSS

SEQ ID NO: 884 - protein, 125 aa, synthetic construct
  REGION 1..125: note = Synthetic
QVQLQQSGGGLVQAGGSLRLSCAASGRTFSNYVMGWFRQPPGKEREFVAAISWSGGTTSYADSVKGRFTISRDNAKNTVYLQMNSLKPDDTAVYYCAAEHGAGSRWYFPEDFGSWGQGTQVTVSS

SEQ ID NO: 885 - protein, 112 aa, synthetic construct
  REGION 1..112: note = Synthetic
QVQLQESGGGLVQPGGSLRLSCAFSGNIFSINLMTWYRQAPGKQREFVASITSSGNTNYVNSGKGRFTISTDNAKNTMYLQLNSLQPEDTAVYYCHCDWCSWGQGTQVTVSS

SEQ ID NO: 886 - protein, 126 aa, synthetic construct
  REGION 1..126: note = Synthetic
QVQLQESGGGLVQAGGSLRLSCAASGGTFSSYPMGWFRQAPGKEREFVAAISWSGGVTYYADSVKGRFTISRDNAKNTVYLQMNSLKPEDTAVYYCAAQSGPYGSSSSWEADFDSWGQGTQVTVSS

SEQ ID NO: 887 - protein, 125 aa, synthetic construct
  REGION 1..125: note = Synthetic
QVQLQESGGGLVQAGGSLRLSCVASGRTFSSYVMAWFRQAPGKEREFVAAISWSGGVTNYADSVKGRFIISRDNAKNTVYLQMNSLKPEDTAVYYCAAEVGYGSRWYYETDFGSWGQGTQVTVSS

SEQ ID NO: 888 - protein, 121 aa, synthetic construct
  REGION 1..121: note = Synthetic
QVQLQQSGGGLVQAGGSLRLSCAASGRTLSSYAMGWFRQAPGKEREFVAAISWSGGVTHYEDSVKGRFTISRDNAKNTVYLQMNSLKPEDTAVYYCAALPDGRSWYQADYWGQGTQVTVSS

SEQ ID NO: 889 - protein, 125 aa, synthetic construct
  REGION 1..125: note = Synthetic
QVQLQQSGGGLVQAGGSLRLSCAASGRTFSSYAMGWFRQAPGKEREFVAAISWSGGVTHYADSVKGRFTISRDNAKNTVYLQMNSLKPEDTAVYYCAAENGYGSSWYFEADFGSWGQGTQVTVSS

SEQ ID NO: 890 - protein, 123 aa, synthetic construct
  REGION 1..123: note = Synthetic
QVQLQQSGGGLVQAGGSLRLSCAASGRTFSGSGMGWFRQAPGKEREFVAAISWTGSITYYADSVKGRFTISRENAKNTVYLQMNSLKPEDTAVYYCARATMGPTSRSDAYDYWGQGTQVTVSS

SEQ ID NO: 891 - protein, 112 aa, synthetic construct
  REGION 1..112: note = Synthetic
QVQLQESGGGLVQPGGSLRLSCAFSGNIFSINVMSWYRQAPGKQREFVADITSGGNTNYVNFGKGRFTISTDNAKNTMYLQLNSLQPEDTAVYYCHCDWCSWGQGTQVTVSS

SEQ ID NO: 892 - protein, 112 aa, synthetic construct
  REGION 1..112: note = Synthetic
QVQLQQSGGGLVQPGGSLRLSCAFSGNIFSINVMSWYRQAPGKQREFVADITSGGDTNYVNSGKGRFTISTDNAKNTMYLQLNSLQPEDTAVYYCHCDWCSWGQGTQVTVSS

SEQ ID NO: 893 - protein, 112 aa, synthetic construct
  REGION 1..112: note = Synthetic
QVQLQESGGGLVQPGGSLRLSCAFSGNIFSINLMTWYRQAPGKQREFVASITSGGHTNYVNSGKGRFTISTDNAKNTMYLQLNSLQPEDTAVYYCHCDWCSWGQGTQVTVSS

SEQ ID NO: 894 - protein, 125 aa, synthetic construct
  REGION 1..125: note = Synthetic
QVQLQESGGGLVQPGDSLRLSCAASGGTFSNYAMGWFRQAPGKEREFVAAISWSGGVAHYADSVKGRFTISRDNAKNTVYLQMNSLKPEDTAVYTCAAEVGYGTSWYYEADFGSWGQGTQVTVSS

SEQ ID NO: 895 - protein, 123 aa, synthetic construct
  REGION 1..123: note = Synthetic
QVQLQESGGGLVQAGGSLRLSCAASGRTFSGSGMGWFRQAPGKEREFVAVISWTGSITYYADSVKGRFTISRENAKNTVYLQMNSLKPEDTAVYYCARSTVGPTSRSDAYDYWGQGTQVTVSS

SEQ ID NO: 896 - protein, 120 aa, synthetic construct
  REGION 1..120: note = Synthetic
QVQLQESGGGLVQAGGSLRLSCTASGRTLSDYIMGWFRQAPGKEREFVAAIAWSGSTTQYTDSVKGRFTISRDNAKNTAYLQMNSLKPEDTAVYYCAGDLHGIGYEYKYWGQGTQVTVSS

SEQ ID NO: 897 - protein, 123 aa, synthetic construct
  REGION 1..123: note = Synthetic
QVQLQESGGGLVQAGGSLRLSCAASGRTFSGSPMGWFRQAPGKEREFVAVISWTGSITYYADSVKGRFTISRENAKNTVYLQMNSLKPEDTAVYYCARSTVGPTSRSDAYDYWGQGTQVTVSS

SEQ ID NO: 898 - protein, 112 aa, synthetic construct
  REGION 1..112: note = Synthetic
QVQLQESGGAVVQPGGSLRLSCAFSGNVLSINLMTWYRQAPGKQREFVASITSGGDTNYVNFGKGRFTIATDNAKNMMYLQLNSLQPEDTAVYYCHCDWCSWGQGTLVTVSS

SEQ ID NO: 899 - protein, 133 aa, synthetic construct
  REGION 1..133: note = Synthetic
QVQLQESGGGLVQAGGSLRLSCVASGRAFSRYTMGWFRQAPGKEREFAATIDWSGGIDWSGGRSTFYADSVKGRFTISRDNAENTVYLQMNSLKPEDTAVYYCAAIDYPGTRPAVSANEYDYWGQGTQVTVSS

SEQ ID NO: 900 - protein, 120 aa, synthetic construct
  REGION 1..120: note = Synthetic
QVQLQESGGGLVQAGGSLRLSCTASGRTLSNYIMAWFRQAPGREREFVAAIAWSGSVTQYADSVKGRFTISRDNAKNTAYLQMNSLKPEDTAVYYCAGDLHGIGYEYAYWGQGTQVTVSS

SEQ ID NO: 901 - protein, 120 aa, synthetic construct
  REGION 1..120: note = Synthetic
QVQLQESGGGLVQAGGSLRLSCTASGRTLSSYIMAWFRQAPGKEREFVAAIGWSGSTTQYADSVKGRFTISRDNAKNTAYLQMNALKPEDTAVYYCAGDLQGIGYEYHNWGQGTQVTVSS

SEQ ID NO: 902 - protein, 125 aa, synthetic construct
  REGION 1..125: note = Synthetic
QVQLQESGGGLVQAGGSLRLSCAASGGTFSNYVMGWFRQAPGKEREFVAAISWSGGSTYYADSVKGRFTISRDNAKNTVYLQMNSLKPEDTAVYYCAAETGGGSRWYRTADFGSWGQGTQVTVSS

SEQ ID NO: 903 - protein, 122 aa, synthetic construct
  REGION 1..122: note = Synthetic
QVQLQQSGGGLVQAGGSLTLSCAASGRTFSTYGMGWFRQAPGKEREFVAAISASGGGTAYANSVKARFTISRDNAKNTVYLQMNSLKPEDTAVYYCAADRTTWGRQTPYDYWGQGTQVTVSS

SEQ ID NO: 904 - protein, 125 aa, synthetic construct
  REGION 1..125: note = Synthetic
QVQLQESGGGLVQAGGSLRLSCAASGRTFSTYAMGWFRQAPGKEREFVTRIRWNTGSTDYADSVKGRFTISRDKAKNMVWLQMDSLKPEDTAVYYCALKRYGGGTSTYDQGYDTWGQGTQVTVSS

SEQ ID NO: 905 - protein, 125 aa, synthetic construct
  REGION 1..125: note = Synthetic
QVQLQQSGGGLVQAGGSLRLSCAASGRTFSSGAMGWFRQAPGKEREFAAAISRSGSSTLYADSVKGRFTITRDSAKSTVFLQMNSLKPEDTAVYYCAASLGRAYETSASGAYDYWGQGTQVTVSS

SEQ ID NO: 906 - protein, 122 aa, synthetic construct
  REGION 1..122: note = Synthetic
QVQLQESGGGLVQTGDSLRLSCAASGRTFRSYGVAWFRQAPGKERDFVASISSSGGGTSYAGSVKDRFAIFRDNAKNTVYLQMNSLKPEDTAVYYCAGAVRDWGRDAIYDSWGQGTQVTVSS

SEQ ID NO: 907 - protein, 122 aa, synthetic construct
  REGION 1..122: note = Synthetic
QVQLQESGGGLVQPGGSLRLSCAASGFTFSRYAMSWYRQAPGKERELVARITSAGGSTNYADSVKGRFTISRDNAKNTVYLQMNSLKPEDTAVYYCNAEMYSNADVMFNGYWGQGTQVTVSS

SEQ ID NO: 908 - protein, 126 aa, synthetic construct
  REGION 1..126: note = Synthetic
QVQLQESGGGLVQAGGSLRLSCAASGRTISNYTMGWFRQAPGKEREFVAGINPSGGATYYAPFVKDRFTISRDSAKNTVYLQMNSLKPEDTAVYSCAAGSSHGRRWYIDGGRYDYWGQGTQVTISS

SEQ ID NO: 909 - protein, 122 aa, synthetic construct
  REGION 1..122: note = Synthetic
QVQLQESGGGLVQPGGSLRLSCAASGFTFSNYAMSWYRQAPGKERELVARITSTGGSTNYADSVKGRFTISRDNAKNTVYLQMNSLKPEDTAVYYCNAEIYTHYDVMFNGYWGQGTQVTVSS

SEQ ID NO: 910 - protein, 122 aa, synthetic construct
  REGION 1..122: note = Synthetic
QVQLQESGGGSVQAGGSLRLSCAASGRTFSTYGMGWFRQAPGKEREFVAGISASGGGTAYVSSVKARFTISRDNAKNTVYLQMNSLKPEDTAIYYCAAARTGWGRQTTHDYWGQGTQVTVSS

SEQ ID NO: 911 - protein, 115 aa, synthetic construct
  REGION 1..115: note = Synthetic
QVQLQQSGGGLVQPGGSLRLSCKASGFTFSSYSMRWYRQIPENEREFVAFISSGGGDITSVADSVKGRFTITRDDTRNTVYLQMNSLKPEDTAVYYCMRVSGDYWGQGTQVTVSS

SEQ ID NO: 912 - protein, 125 aa, synthetic construct
  REGION 1..125: note = Synthetic
QVQLQESGGGLVQAGGSLRLSCTASGRTFSSGAMGWFRQAPGKEREFVAAISRSGSGTLYADSVKGRFTITRVSAKSTVFLQMNSLNPEDTAVYYCAASLGRAYETSASGAYDYWGQGTQVTVSS

SEQ ID NO: 913 - protein, 122 aa, synthetic construct
  REGION 1..122: note = Synthetic
QVQLQQSGGGLVQAGGSLRLSCTASGRTFRSYGVGWFRQAPGKERDFVAGISWSGGGTAYAGSVKDRFAIFRDNAKSTVYLQMNSLKPEDTAVYYCAGAVGDWGRDAIYDYWGQGTQVTVSS

SEQ ID NO: 914 - protein, 122 aa, synthetic construct
  REGION 1..122: note = Synthetic
QVQLQQSGGGLVQAGGSLRLSCAASGRTFSSYGMGWFRQVPGKEREFVTGISTSGGGTSYANFVNDRFTISRDNAKNTVYLQMNSLKPGDTAVYYCAASSRGWGRGVSYDYWGQGTQVTVSS

SEQ ID NO: 915 - protein, 125 aa, synthetic construct
  REGION 1..125: note = Synthetic
QVQLQQSGGGLVQAGGSLRLSCAASGGTFSNYVMGWFRQAPGKEREYVAAISWSGGNAIYADSVKGRFTISRDNAKNTVYLQMDRLKPEDTALYYCAAETGYGNRWYAPADFGSWGQGTQVTVSS

SEQ ID NO: 916 - protein, 122 aa, synthetic construct
  REGION 1..122: note = Synthetic
QVQLQESGGGSVQAGGSLRLSCAASGHTFSTYGMGWFRQAPGKEREFVAGISASGGGTAYVSSVKARFTISRDNAKNTVYLQMNSLKPEDTAIYYCAAARTGWGRQTTHDYWGQGTQVTVSS

SEQ ID NO: 917 - protein, 122 aa, synthetic construct
  REGION 1..122: note = Synthetic
QVQLQQSGGGLVQAGGSLRLSCAASGRTFSSYGMGWFRQAPGKEREFVTGISRSGGGTSFAPFVKGRFTISRDNAKNTVYLQMNSLKPGDTAIYYCAASSTGWGREDSYDYWGQGTQVTVDS

SEQ ID NO: 918 - protein, 126 aa, synthetic construct
  REGION 1..126: note = Synthetic
QVQLQESGGGLVQAGGSLRLSCAASGRTFSSYVMGWFRQAPGKEREFVAAISWSGGVTYYADSVKGRFTISRDNAKNTMYLQMNSLKPEDTAVYYCAASDSENSGSYYRNQDFGYWGQGTQVTVSS

SEQ ID NO: 919 - protein, 126 aa, synthetic construct
  REGION 1..126: note = Synthetic
QVQLQQSGGGLVQAGGSLRLSCAASGRTFSNYAMGWFRQAPGKEREFVAAISWSGGITWYADSVKGRFTISRDNAKNTVYLQMNSLKPEDTAVYYCAADRGTDSGSYYYTEDFGSWGQGTQVTVSS

SEQ ID NO: 920 - protein, 124 aa, synthetic construct
  REGION 1..124: note = Synthetic
QVQLQESGGGLVQAGGSLRLSCAASGGTFSSYVMGWFRRAPGKERDFVAAISWSGGVTQYADSVKGRFTISRDNAKNTVYLQMNSLKPEDTAVYYCAADRTAVVPAQIRSYNYWGQGTQVTVSS

SEQ ID NO: 921 - protein, 125 aa, synthetic construct
  REGION 1..125: note = Synthetic
QVQLQESGGGLVQAGGSLRLSCAASGRTFSNYIMGWFRQAPGKEREFVAAISWSGGVTHYADSVKGRFTISRDNANNTVFLQMNSLKPEDTAVYYCAAEVGYGSSWYYEADFGSWGQGTQVTVSS

SEQ ID NO: 922 - protein, 122 aa, synthetic construct
  REGION 1..122: note = Synthetic
QVQLQESGGGLVQAGGSLRLSCAASGRTFSSYAMGWFRQAPGKEREFVAAISWSGGITYYADSVKGRFTISRDNAKNTVYLQMNSLKPEDTAVYYCAADLEGAGNFREFGSWGQGTQVTVSS

SEQ ID NO: 923 - protein, 124 aa, synthetic construct
  REGION 1..124: note = Synthetic
QVQLQESGGGLVQAGGSLRLSCAASGRTFSSYVMGWFRRAPGKEREFVAAISWSGGVTQYADSVKGRFTASRDNAKNTVYLQMSSLKPEDTAVYYCAADRTAIVPAQIRSYDYWGQGTQVTVSS

SEQ ID NO: 924 - protein, 123 aa, synthetic construct
  REGION 1..123: note = Synthetic
QVQLQESGGGLEQPGGSLRLSCLVSGRTGGSFDMGWFRRTPGKEREFIAAITWSGGSTEYADSVKGRFTISRDNGKNTVQLQMNSLKPEDTAVYYCAAGGFGALGVEHRYRYWGQGTQVTVSS

SEQ ID NO: 925 - protein, 112 aa, synthetic construct
  REGION 1..112: note = Synthetic
QVQLQESGGGLVQPGGSLRLSCAFSGNIFSISLMTWYRQAPGKQREFVASITSGGNTDYVNSGKGRFTISTDNAKNTMYLQLNSLQPEDTAVYYCHCDWCSWGQGTQVTVSS

SEQ ID NO: 926 - protein, 120 aa, synthetic construct
  REGION 1..120: note = Synthetic
QVQLQESGGGLVQAGGSLRLACVASGRTFKIYGVAWFRQAPGKERDFVAGISSSGGGTAYAGSVKDRFAISRDNAKNTVYLQMNSLKPEDTAVYYCAVGGWGRDDIYDYWGQGTQVTVSS

SEQ ID NO: 927 - protein, 125 aa, synthetic construct
  REGION 1..125: note = Synthetic
QVQLQQSGGGLVQAGGSLRLSCAASARTFSEYIMAWFRQAPGKEREFVAAISSSGATTAYSNSVKDRFTISRDNAKNTLFLQLNNLKLEDTAAYYCAANRFLSAARYDRQRYDYWGQGTQVTVSS

SEQ ID NO: 928 - protein, 122 aa, synthetic construct
  REGION 1..122: note = Synthetic
QVQLQESGGGSVQAGGSLTLSCAVSGHTFSTYGMGWFRQAPGKEREYVAGISASGGGTAYVSSVKARFTISRDNAKNTVYLQMNSLKPEDTAIYYCAAARASWGRQTTHDYWGQGTQVTVSS

SEQ ID NO: 929 - protein, 114 aa, synthetic construct
  REGION 1..114: note = Synthetic
QVQLQESGGGLVQPGGSLRLSCAASGLTLNNYALRWYRQSAGSERELVAFISAGGDIISYAESVKGRFTITRDNTKNTVYLQMNSLKPEDTAVYRCNRVSGDYWGQGTQVTVSS

SEQ ID NO: 930 - protein, 122 aa, synthetic construct
  REGION 1..122: note = Synthetic
QVQLQESGGGLVQAGGSLRLSCAASGRTFSTYGMGWFRQAPGKEQEFVSSISASGGGTAYANSVKARFTISRDNAKNTVYLQMNNLKPEDTAVYYCAAARTGWGRQTTYDYWGQGTQVTVSS

SEQ ID NO: 931 - protein, 124 aa, synthetic construct
  REGION 1..124: note = Synthetic
QVQLQESGGGLVQAGGSLRLSCAASGGSLSNYIVGWFRQAPGKEREFVAIISWSGEVTDYADSVKGRFTISRDNAGNTVNLQMNNLNPEDTAVYYCAGEHNGRSWYDVGNYAYWGQGTQVTVSS

SEQ ID NO: 932 - protein, 125 aa, synthetic construct
  REGION 1..125: note = Synthetic
QVQLQESGGGLVQAGGSLTLSCGPSGRTFSSGAMGWFRQAPGKEREFVAAISRSGSRTLYADSVKGRFTITRDSAKPTVFLQMNSLKPEDTAVYYCAASLGRGYENSDSGAYDYWGQGTQVTVAS

SEQ ID NO: 933 - protein, 124 aa, synthetic construct
  REGION 1..124: note = Synthetic
QVQLQQSGGGLVQPGGSLRLSCAASGFNLNYYAIGWFRQAPGKEREGVSCISSSDGSTVYADSVKGRFTISRDNAKVYLQMNSLKPEDTAVYYCAARAGGEFYYCSGDSSADYWGQGTQVTVSS

SEQ ID NO: 934 - protein, 124 aa, synthetic construct
  REGION 1..124: note = Synthetic
QVQLQESGGGLVQAGGSLRLSCVPGRTFSSGAMGWFRQAPGKEREFVASISRSSSRTLYADSVKGRFTITRDSAKNTMFLQMNSLKPEDTAVYYCAASLSRGYETSDSGAYDYWGQGTQVTVSS

SEQ ID NO: 935 - protein, 122 aa, synthetic construct
  REGION 1..122: note = Synthetic
QVQLQESGGGLVQAGGSLRLSCVASGRTFRMYGVGWFRQGPGKERAFVAGISSSGAGTAFAGSVEGRFAISRDNAKNTVYLQMNNLKPEDTAVYYCAGADRDWGRDAIYDYWGQGTQVTVSS

SEQ ID NO: 936 - protein, 114 aa, synthetic construct
  REGION 1..114: note = Synthetic
QVQLQQSGGGLVQPGGSLRLSCAASGFTWNNYGMRWYRQTPGKEREYVAFINSGGDIISYADSVKGRFTITRDNLRNVVYLQMNSLKPEDTAVYYCNRISGDYWGQGTQVTVSS

SEQ ID NO: 937 - protein, 124 aa, synthetic construct
  REGION 1..124: note = Synthetic
QVQLQESGGGLVQAGGSLRLSCVPGRTFSFGAMAWFRQAPGKEREFVASISRSVSRTLYADSVKGRFTITRDSAKNTMFLQMNSLKPEDTAVYYCAASQGRGYETSATGAYDYWGQGTQVTVSS

SEQ ID NO: 938 - protein, 126 aa, synthetic construct
  REGION 1..126: note = Synthetic
QVQLQQSGGGLVQAGGSLRLSCAASGRTFSDYIMGWFRQAPGKEREFVAAISWSGGVTHYADSVKGRFTISRDNAKNTVYLQMNSLKPEDTAVYYCAADGRSDSGGSYYPADFGSWGQGTQVTVSS

SEQ ID NO: 939 - protein, 127 aa, synthetic construct
  REGION 1..127: note = Synthetic
QVQLQESGGDLVQAGGSLRLSCAASGFTFDDYAIGWFRQAPGKEREGVSCIERSGSSTWYADSVKGRFTISSDNAKNTVYLQMNSLKPEDMAVYYCAAGRVCSGYGGRIQGYEYDYWGQGTQVTVSS

SEQ ID NO: 940 - protein, 124 aa, synthetic construct
  REGION 1..124: note = Synthetic
QVQLQQSGGGLVQAGGSLRLSCVPGRTFSFGAMGWFRQAPGKEREFVASISRSVSRTLYADSVKGRFTITRDSAKNTMFLQMNSLKPEDTAVYYCAASQGRGYETSDTGAYDYWGQGTQVTVTS

SEQ ID NO: 941 - protein, 120 aa, synthetic construct
  REGION 1..120: note = Synthetic
QVQLQESGGGLVQAGGSLRLSCAASGRTFTMYGVGWFRQAPGKEREFVAGISSSGGGTSYAGSVKGRFAISKDNAKNTVYLQMNSLKPEDTAVYYCAVGGWGRDDIYEYWGQGTQVTVSS

SEQ ID NO: 942 - protein, 125 aa, synthetic construct
  REGION 1..125: note = Synthetic
QVQLQESGGGLVQAGGSLTLSCGPSGRTFSSGAMGWFRQAPGKEREFVAAISRSGSTTLYADSVKGRFTITRDSAKPTVFLQMNSLKPEDTAVYYCAASLGRGYENSDSGAYDYWGQGTQVTVAS

SEQ ID NO: 943 - protein, 124 aa, synthetic construct
  REGION 1..124: note = Synthetic
QVQLQESGGGLVQAGGSLRLSCVPGRTFSSGAMGWFRQAPGKEREFVASISRSSSRTLYADSVKGRFTITRDSAKNTMFLQMNSLKPEDTAVYYCAASLSRAYETSDSGAYDYWGQGTQVTVSS

SEQ ID NO: 944 - protein, 122 aa, synthetic construct
  REGION 1..122: note = Synthetic
QVQLQQSGGGSVQAGGSLRLSCVASGRTFSTYGMGWFRQAPGKEREYVAGISASGGGTAYVSSVKARFTISRDNAKNTVYLQMNSLKPEDTAIYYCAAARTSWGRQTTHDYWGQGTQVTVSS

SEQ ID NO: 945 - protein, 126 aa, synthetic construct
  REGION 1..126: note = Synthetic
QVQLQESGGGVVQAGGSLRLSCAASGRTFSDYVMGWFRQAPGKEREFVAAISWSGGVTHYADSVKGRFTISRDNAQNTAYLQMDSLKPEDTAVYYCAADARSDSGRWYYPADFGSWGQGTQVTVSS

SEQ ID NO: 946 - protein, 126 aa, synthetic construct
  REGION 1..126: note = Synthetic
QVQLQESGGGLVQAGGSLRLSCAASGRTFSSYAMGWFRQAPGKEREFVAAISWSGGITWYADSVKGRFTISRDNAKNTVYLQMNSLKPEDTAVYYCAADTGADSGSYYYPADFGSWGQGTQVTVSS

SEQ ID NO: 947 - protein, 126 aa, synthetic construct
  REGION 1..126: note = Synthetic
QVQLQESGGGLVQAGGSLRLSCAASGGTFSSYIMGWFRQGPGKEREFVAAISWSGGVTYYADSVKGRFTISRDNAKNTVYLQMNSLKPEDTAVYYCAADARSDSGRYYYPADFGSWGQGTQVTVSS

SEQ ID NO: 948 - protein, 122 aa, synthetic construct
  REGION 1..122: note = Synthetic
QVQLQQSGGGLVQAGGSLRLSCAASGRTLSNYAMAWFRQAPGKERALVASISGSGSNTNYPNSVKDRFTISRDNAKNTVYLQMNSLKPEDTAVYYCAAREGLALRYATYDYWGQGTQVTVSS

SEQ ID NO: 949 - protein, 112 aa, synthetic construct
  REGION 1..112: note = Synthetic
QVQLQESGGGLVQPGGSLRLSCAFSGNIFSIALMTWYRQAPGKQREFVASITSGGNTNYVNSGKGRFTISTDNAKNTMYLQLNSLQPEDTAVYYCHCDWCSWGQGTQVTVSS

SEQ ID NO: 950 - protein, 122 aa, synthetic construct
  REGION 1..122: note = Synthetic
QVQLQQSGGGSVQPGGSLRLSCAASGRTFSTYGMGWFRQAPGKEREFVAGISASGGGTAYIGSVKARFTISRDNAKNTVYLQMNSLKPEDTAIYYCAVARTGWGREATHDYWGQGTQVTVSS

SEQ ID NO: 951 - protein, 124 aa, synthetic construct
  REGION 1..124: note = Synthetic
QVQLQQSGGRLVQAGGSLRLSCAASGRTFSDYEMAWFRQGPGKEREFVAGISGSGGTTAFANFVKGRFIISRDNAKNTMYLQMNNLKLEDTGVYYCAARVPRVGRFDENEYEYWGQGTQVTVSS

SEQ ID NO: 952 - protein, 122 aa, synthetic construct
  REGION 1..122: note = Synthetic
QVQLQQSGGGLVQAGGSLRLSCAASGDTFSAYGMGWFRQTPGKEREFVAGISSGGGGTAYAGSVKDRFTIFRDNAKNTVYLQMNSLKPEDTAVYYCARAVRSWGRAAEHDYWGQGTQVTVSS

SEQ ID NO: 953 - protein, 123 aa, synthetic construct
  REGION 1..123: note = Synthetic
QVQLQESGGGLVQAGVSLTLSCAASGRTASTSTMAWFRQPPGKEREFVGVWSGGSTNYVNDRLIISRDNAKNTVYLQMNSLKPEDTAVYYCAASPRIWYRDTNYKRATWYDYWGQGTQVTVSS

SEQ ID NO: 954 - protein, 126 aa, synthetic construct
  REGION 1..126: note = Synthetic
QVQLQESGGGLVQAGGSLRLSCAASGRTFSDYAMAWFRQVPGKEREFVASISWSGGVTWYADSVKGRFTISRDNAKNTVYLQMNSLKPEDTAVYYCAADARSDHASYYYPADFGFWGQGTQVTVSS

SEQ ID NO: 955 - protein, 125 aa, synthetic construct
  REGION 1..125: note = Synthetic
QVQLQQSGGGLVQAGGSLRLSCAASGRTFSGYIMAWFRQAPGKEREFVAAISSSGATTAYSASVKDRFTISRDNAKNTSFLQMNNLKLEDTAAYYCAADQFDSTARYDRRQYEYWGQGTQVTVSS

SEQ ID NO: 956 - protein, 116 aa, synthetic construct
  REGION 1..116: note = Synthetic
QVQLQQSGGGLVQAGGSLRLSCTASGSTLSTYAFNWFRQAPGKQRELVATISRGGKTTYADSVKGRFTVSRDNAKSTVYLQMNSLKPEDTAVYYCDTVGYYPEIRSGQGTQVTVSS

SEQ ID NO: 957 - protein, 112 aa, synthetic construct
  REGION 1..112: note = Synthetic
QVQLQQSGGGLVQPGGSLRLSCAASGSIFGYAMGWYRQAPGKQREWVAEISRGGTPNYADSVKGRFTISRDNAKNTVYLQMNSLKADDTAVYYCRCLGFDYWGQGTQVTVSS

SEQ ID NO: 958 - protein, 120 aa, synthetic construct
  REGION 1..120: note = Synthetic
QVQLQESGGGLVQAGGSLTLSCTASGSIFGIKAMGWYRQAPGKERDLVAQITEGGTTNYADSVKGRFTISRDTAKNTLYLQMNSLKPEDTAVYYCNSLWSLLEQYPRYFWGQGTQVTVSS

SEQ ID NO: 959 - protein, 127 aa, synthetic construct
  REGION 1..127: note = Synthetic
QVQLQESGGGLVQPGGSLRLSCAASGFTPVYYAISWFRQAPGKEREWVSCISSVDGKTNYADSVKGRFTISRMNAKNTVYLQMNTLKPDDTAVYYCAAEGPPYDPGQLCPYNDMDYWGKGTLVTVSS

SEQ ID NO: 960 - protein, 120 aa, synthetic construct
  REGION 1..120: note = Synthetic
QVQLQESGGGSVRSGGSLTLSCTASLNSGSIAGMGWYRQAPGKERELVAGITRGGSSNYGDSVKGRFTVSRDNAKNAMYLQMTSLKPEDTAVYRCFAYRKDDFGFEVLYWGQGTQVTVSS

SEQ ID NO: 961 - protein, 116 aa, synthetic construct
  REGION 1..116: note = Synthetic
QVQLQESGGGLVQAGGSLTLSCAATGSTFSNYAMNWYRQAPGKQRELVATISRGGVATYADSVKGRFTVSRDNAKNTVYLQANSLKPEDTALYYCDTVGYYSEVRQGQGTQVTVSS

SEQ ID NO: 962 - protein, 116 aa, synthetic construct
  REGION 1..116: note = Synthetic
QVQLQESGGGLVQAGGSLRLSCTASGSTLSTYAFNWFRQAPGKQRELVATISRGGRTTYAESAKGRFTVSRDNAKSTVYLQMNSLKPEDTAVYYCDTVGYYPEIRSGQGTQVTVSS

SEQ ID NO: 963 - protein, 113 aa, synthetic construct
  REGION 1..113: note = Synthetic
QVQLQQSGGGSVQAGGSLRLSCAGSGITFSAYAMGWYRQAPGKQRELVADISRAGITTYGDSVKGRFIISRDNEKNTVYLQMNSLKPEDTAVYYCRTLGFAYWGQGTQVTVSS

SEQ ID NO: 964 - protein, 113 aa, synthetic construct
  REGION 1..113: note = Synthetic
QVQLQESGGGSVQAGGSLRLSCAGSGITFSAYAMGWYRQAPGKQRELVADISRAGITTYGDSVKGRFIISRDNEKNTVYLQMNSLKPEDTAVYYCRTLGFPYWGQGTQVTVSS

SEQ ID NO: 965 - protein, 112 aa, synthetic construct
  REGION 1..112: note = Synthetic
QVQLQESGGGLVQPGESLRLSCVASGSIAPYAMGWYRQAPGQQREWVAHISRGSLPDYADSVKGRFFISRDNAKNTVYLQMNSLKPEDTAVYQCRTLGFDYWGQGTQVTVSA

SEQ ID NO: 966 - protein, 116 aa, synthetic construct
  REGION 1..116: note = Synthetic
QVQLQQSGGGLVQAGGSLRLSCAASGSTFSSYVMGWYRQAPGKQRELVAGISSGGSTNYADSVKGRFTISRDNVKNTVSLQMNSLKPEDTAVYYCNLRDRFGHGYWGQGTQVTVSS

SEQ ID NO: 967 - protein, 113 aa, synthetic construct
  REGION 1..113: note = Synthetic
QVQLQQSGGGLVQPGGSLRLSCAGSGTTLSNYAMGWYRQAPGKQRESVADISRGGTPDYADSVKGRFTISRDNAKNTVTLQMNRLEPEDTAVYYCKILGFDVWGQGTQVTVSS

SEQ ID NO: 968 - protein, 120 aa, synthetic construct
  REGION 1..120: note = Synthetic
QVQLQESGGGSVRAGGSLRLSCTASLNSGSIAGMGWYRQAPGKERELVAGITRGGSSNYGDSVKGRFTVSRDNAKNTLYLQMSSLKPEDTAVYYCFAYRKDDFGFEVLYWGQGTQVTVSS

SEQ ID NO: 969 - protein, 9 aa, synthetic construct
  REGION 1..9: note = Synthetic
GRSLSTVSM

SEQ ID NO: 970 - protein, 9 aa, synthetic construct
  REGION 1..9: note = Synthetic
GFTFSSYWM

SEQ ID NO: 971 - protein, 9 aa, synthetic construct
  REGION 1..9: note = Synthetic
GRTFSRYTM

SEQ ID NO: 972 - protein, 9 aa, synthetic construct
  REGION 1..9: note = Synthetic
GRTFSSYTM

SEQ ID NO: 973 - protein, 9 aa, synthetic construct
  REGION 1..9: note = Synthetic
ERTFSRYTM

SEQ ID NO: 974 - protein, 9 aa, synthetic construct
  REGION 1..9: note = Synthetic
GFIVNSYWM

SEQ ID NO: 975 - protein, 9 aa, synthetic construct
  REGION 1..9: note = Synthetic
GHDFSKYTM

SEQ ID NO: 976 - protein, 9 aa, synthetic construct
  REGION 1..9: note = Synthetic
GFTFSRYTM

SEQ ID NO: 977 - protein, 9 aa, synthetic construct
  REGION 1..9: note = Synthetic
GRTFSRYTM

SEQ ID NO: 978 - protein, 9 aa, synthetic construct
  REGION 1..9: note = Synthetic
GRTFSRYTM

SEQ ID NO: 979 - protein, 9 aa, synthetic construct
  REGION 1..9: note = Synthetic
GRDFSRYTM

SEQ ID NO: 980 - protein, 8 aa, synthetic construct
  REGION 1..8: note = Synthetic
GTFSSYTM

SEQ ID NO: 981 - protein, 9 aa, synthetic construct
  REGION 1..9: note = Synthetic
GRTFSSYAM

SEQ ID NO: 982 - protein, 9 aa, synthetic construct
  REGION 1..9: note = Synthetic
GRTGIKWTM

SEQ ID NO: 983 - protein, 9 aa, synthetic construct
  REGION 1..9: note = Synthetic
GSIFRIIAM

SEQ ID NO: 984 - protein, 9 aa, synthetic construct
  REGION 1..9: note = Synthetic
GRTFSSYTM

SEQ ID NO: 985 - protein, 9 aa, synthetic construct
  REGION 1..9: note = Synthetic
SRTFSNYAM

SEQ ID NO: 986 - protein, 9 aa, synthetic construct
  REGION 1..9: note = Synthetic
GRSFSRYTM

SEQ ID NO: 987 - protein, 9 aa, synthetic construct
  REGION 1..9: note = Synthetic
GLTVSRYTM

SEQ ID NO: 988 - protein, 9 aa, synthetic construct
  REGION 1..9: note = Synthetic
GLTFSRYTM

SEQ ID NO: 989 - protein, 9 aa, synthetic construct
  REGION 1..9: note = Synthetic
GTGRRFGYM

SEQ ID NO: 990 - protein, 9 aa, synthetic construct
  REGION 1..9: note = Synthetic
GSIFSINVM

SEQ ID NO: 991 - protein, 9 aa, synthetic construct
  REGION 1..9: note = Synthetic
GRDFSTYVM

SEQ ID NO: 992 - protein, 8 aa, synthetic construct
  REGION 1..8: note = Synthetic
RTLYNNAM

SEQ ID NO: 993 - protein, 9 aa, synthetic construct
  REGION 1..9: note = Synthetic
GRTISNYGV

SEQ ID NO: 994 - protein, 9 aa, synthetic construct
  REGION 1..9: note = Synthetic
GPPSRRYDM

SEQ ID NO: 995 - protein, 9 aa, synthetic construct
  REGION 1..9: note = Synthetic
GEIDSAAGM

SEQ ID NO: 996 - protein, 9 aa, synthetic construct
  REGION 1..9: note = Synthetic
GSMFSIHDM

SEQ ID NO: 997 - protein, 9 aa, synthetic construct
  REGION 1..9: note = Synthetic
GRTADRYAI

SEQ ID NO: 998 - protein, 11 aa, synthetic construct
  REGION 1..11: note = Synthetic
GGSIRTDRYYW

SEQ ID NO: 999 - protein, 9 aa, synthetic construct
  REGION 1..9: note = Synthetic
GIIFSINAM

SEQ ID NO: 1000 - protein, 9 aa, synthetic construct
  REGION 1..9: note = Synthetic
GSIFSIYTM

SEQ ID NO: 1001 - protein, 9 aa, synthetic construct
  REGION 1..9: note = Synthetic
GSISSISGM

SEQ ID NO: 1002 - protein, 8 aa, synthetic construct
  REGION 1..8: note = Synthetic
SIGSIHRM

SEQ ID NO: 1003 - protein, 9 aa, synthetic construct
  REGION 1..9: note = Synthetic
GRTFSSYAM

SEQ ID NO: 1004 - protein, 9 aa, synthetic construct
  REGION 1..9: note = Synthetic
GTRGSINPV

SEQ ID NO: 1005 - protein, 9 aa, synthetic construct
  REGION 1..9: note = Synthetic
GRTFNGKGM

SEQ ID NO: 1006 - protein, 9 aa, synthetic construct
  REGION 1..9: note = Synthetic
GMTFSDHAM

SEQ ID NO: 1007 - protein, 9 aa, synthetic construct
  REGION 1..9: note = Synthetic
GSGRRVGYM

SEQ ID NO: 1008 - protein, 9 aa, synthetic construct
  REGION 1..9: note = Synthetic
GIISSITYM

SEQ ID NO: 1009 - protein, 9 aa, synthetic construct
  REGION 1..9: note = Synthetic
QSIFRINAM

SEQ ID NO: 1010 - protein, 9 aa, synthetic construct
  REGION 1..9: note = Synthetic
GIMLRDEAL

SEQ ID NO: 1011 - protein, 9 aa, synthetic construct
  REGION 1..9: note = Synthetic
GDTISSYTM

SEQ ID NO: 1012 - protein, 9 aa, synthetic construct
  REGION 1..9: note = Synthetic
RIISSITDM

SEQ ID NO: 1013 - protein, 9 aa, synthetic construct
  REGION 1..9: note = Synthetic
APLNSIHAM

SEQ ID NO: 1014 - protein, 9 aa, synthetic construct
  REGION 1..9: note = Synthetic
GRIFGINGW

SEQ ID NO: 1015 - protein, 9 aa, synthetic construct
  REGION 1..9: note = Synthetic
RGTFSNLGL

SEQ ID NO: 1016 - protein, 6 aa, synthetic construct
  REGION 1..6: note = Synthetic
GRTFNM

SEQ ID NO: 1017 - protein, 9 aa, synthetic construct
  REGION 1..9: note = Synthetic
GRTFSDLGM

SEQ ID NO: 1018 - protein, 9 aa, synthetic construct
  REGION 1..9: note = Synthetic
DTIFSSNGM

SEQ ID NO: 1019 - protein, 9 aa, synthetic construct
  REGION 1..9: note = Synthetic
RGTFNNYGL

SEQ ID NO: 1020 - protein, 9 aa, synthetic construct
  REGION 1..9: note = Synthetic
RGTFNNLGM

SEQ ID NO: 1021 - protein, 9 aa, synthetic construct
  REGION 1..9: note = Synthetic
GRIFGINGW

SEQ ID NO: 1022 - protein, 9 aa, synthetic construct
  REGION 1..9: note = Synthetic
GSPLSINVM

SEQ ID NO: 1023 - protein, 9 aa, synthetic construct
  REGION 1..9: note = Synthetic
ARTFSDYAM

SEQ ID NO: 1024 - protein, 9 aa, synthetic construct
  REGION 1..9: note = Synthetic
GTIGSINPV

SEQ ID NO: 1025 - protein, 9 aa, synthetic construct
  REGION 1..9: note = Synthetic
GRTFSGYGM

SEQ ID NO: 1026 - protein, 9 aa, synthetic construct
  REGION 1..9: note = Synthetic
GRTFTRYGM

SEQ ID NO: 1027 - protein, 9 aa, synthetic construct
  REGION 1..9: note = Synthetic
GSLFSFETM

SEQ ID NO: 1028 - protein, 9 aa, synthetic construct
  REGION 1..9: note = Synthetic
GLIFSASPM

SEQ ID NO: 1029 - protein, 9 aa, synthetic construct
  REGION 1..9: note = Synthetic
GFTLSSYYI

SEQ ID NO: 1030 - protein, 9 aa, synthetic construct
  REGION 1..9: note = Synthetic
RSISSIQAM

SEQ ID NO: 1031 - protein, 9 aa, synthetic construct
  REGION 1..9: note = Synthetic
GFAFDTSPM

SEQ ID NO: 1032 - protein, 9 aa, synthetic construct
  REGION 1..9: note = Synthetic
GFTLDTYAV

SEQ ID NO: 1033 - protein, 9 aa, synthetic construct
  REGION 1..9: note = Synthetic
GFTLDYSAI

SEQ ID NO: 1034 - protein, 11 aa, synthetic construct
  REGION 1..11: note = Synthetic
GGSITTNPYYW

SEQ ID NO: 1035 - protein, 9 aa, synthetic construct
  REGION 1..9: note = Synthetic
GSIFSINAM

SEQ ID NO: 1036 - protein, 9 aa, synthetic construct
  REGION 1..9: note = Synthetic
GFSLDNYDI

SEQ ID NO: 1037 - protein, 9 aa, synthetic construct
  REGION 1..9: note = Synthetic
GFAFDRSAM

SEQ ID NO: 1038 - protein, 9 aa, synthetic construct
  REGION 1..9: note = Synthetic
GFAFDSSAM

SEQ ID NO: 1039 - protein, 7 aa, synthetic construct
  REGION 1..7: note = Synthetic
GIGPNAI

SEQ ID NO: 1040 - protein, 9 aa, synthetic construct
  REGION 1..9: note = Synthetic
GFAFDRSPM

SEQ ID NO: 1041 - protein, 9 aa, synthetic construct
  REGION 1..9: note = Synthetic
GFTLDYYAI

SEQ ID NO: 1042 - protein, 9 aa, synthetic construct
  REGION 1..9: note = Synthetic
GFNLNYYDI

SEQ ID NO: 1043 - protein, 9 aa, synthetic construct
  REGION 1..9: note = Synthetic
GFAFDSSPM

SEQ ID NO: 1044 - protein, 9 aa, synthetic construct
  REGION 1..9: note = Synthetic
GFAFDSSPM

SEQ ID NO: 1045 - protein, 9 aa, synthetic construct
  REGION 1..9: note = Synthetic
GFAFDTSPM

SEQ ID NO: 1046 - protein, 9 aa, synthetic construct
  REGION 1..9: note = Synthetic
GFNLDNYHI

SEQ ID NO: 1047 - protein, 9 aa, synthetic construct
  REGION 1..9: note = Synthetic
GFTRDYYTI

SEQ ID NO: 1048 - protein, 9 aa, synthetic construct
  REGION 1..9: note = Synthetic
GSIFSINAM

SEQ ID NO: 1049 - protein, 9 aa, synthetic construct
  REGION 1..9: note = Synthetic
GFTLDYYTI

SEQ ID NO: 1050 - protein, 9 aa, synthetic construct
  REGION 1..9: note = Synthetic
EFSLANYAI

SEQ ID NO: 1051 - protein, 9 aa, synthetic construct
  REGION 1..9: note = Synthetic
GFTLDYYAI

SEQ ID NO: 1052 - protein, 9 aa, synthetic construct
  REGION 1..9: note = Synthetic
GFAFDRSPM

SEQ ID NO: 1053 - protein, 9 aa, synthetic construct
  REGION 1..9: note = Synthetic
GFAFDRSAM

SEQ ID NO: 1054 - protein, 9 aa, synthetic construct
  REGION 1..9: note = Synthetic
GFTFDSYVM

SEQ ID NO: 1055 - protein, 9 aa, synthetic construct
  REGION 1..9: note = Synthetic
GFTFNTYVM

SEQ ID NO: 1056 - protein, 9 aa, synthetic construct
  REGION 1..9: note = Synthetic
GFTLDYYAI

SEQ ID NO: 1057 - protein, 9 aa, synthetic construct
  REGION 1..9: note = Synthetic
GFAFDTSPM

SEQ ID NO: 1058 - protein, 9 aa, synthetic construct
  REGION 1..9: note = Synthetic
GSIFSINGM

SEQ ID NO: 1059 - protein, 9 aa, synthetic construct
  REGION 1..9: note = Synthetic
GFILDYYAI

SEQ ID NO: 1060 - protein, 9 aa, synthetic construct
  REGION 1..9: note = Synthetic
GFTLDGYAI

SEQ ID NO: 1061 - protein, 9 aa, synthetic construct
  REGION 1..9: note = Synthetic
GFTLEAYAI

SEQ ID NO: 1062 - protein, 9 aa, synthetic construct
  REGION 1..9: note = Synthetic
GFTFEASAM

SEQ ID NO: 1063 - protein, 11 aa, synthetic construct
  REGION 1..11: note = Synthetic
GGSITTNSYYW

SEQ ID NO: 1064 - protein, 9 aa, synthetic construct
  REGION 1..9: note = Synthetic
GFTFDAYVM

SEQ ID NO: 1065 - protein, 9 aa, synthetic construct
  REGION 1..9: note = Synthetic
GFAFEASAM

SEQ ID NO: 1066 - protein, 11 aa, synthetic construct
  REGION 1..11: note = Synthetic
GGSITTNSYYW

SEQ ID NO: 1067 - protein, 9 aa, synthetic construct
  REGION 1..9: note = Synthetic
GFAFDTSPM

SEQ ID NO: 1068 - protein, 11 aa, synthetic construct
  REGION 1..11: note = Synthetic
GGSITTNTYYW

SEQ ID NO: 1069 - protein, 11 aa, synthetic construct
  REGION 1..11: note = Synthetic
GGSITTNSYYW

SEQ ID NO: 1070 - protein, 11 aa, synthetic construct
  REGION 1..11: note = Synthetic
GGSITTNSYYW

SEQ ID NO: 1071 - protein, 9 aa, synthetic construct
  REGION 1..9: note = Synthetic
GFAFDSSAM

SEQ ID NO: 1072 - protein, 9 aa, synthetic construct
  REGION 1..9: note = Synthetic
GFAFDSSPM

SEQ ID NO: 1073 - protein, 9 aa, synthetic construct
  REGION 1..9: note = Synthetic
GFTLDYYDI

SEQ ID NO: 1074 - protein, 7 aa, synthetic construct
  REGION 1..7: note = Synthetic
GISRNAI

SEQ ID NO: 1075 - protein, 9 aa, synthetic construct
  REGION 1..9: note = Synthetic
GFTLDYYAI

SEQ ID NO: 1076 - protein, 9 aa, synthetic construct
  REGION 1..9: note = Synthetic
GFAFDSSAM

SEQ ID NO: 1077 - protein, 11 aa, synthetic construct
  REGION 1..11: note = Synthetic
GGSITTNHYYW

SEQ ID NO: 1078 - protein, 9 aa, synthetic construct
  REGION 1..9: note = Synthetic
GFAFDKSAM

SEQ ID NO: 1079 - protein, 9 aa, synthetic construct
  REGION 1..9: note = Synthetic
GFTLEAYDI

SEQ ID NO: 1080 - protein, 9 aa, synthetic construct
  REGION 1..9: note = Synthetic
GFTFDRSPM

SEQ ID NO: 1081 - protein, 9 aa, synthetic construct
  REGION 1..9: note = Synthetic
GFTLENYAI

SEQ ID NO: 1082 - protein, 9 aa, synthetic construct
  REGION 1..9: note = Synthetic
GFTLDYYTI

SEQ ID NO: 1083 - protein, 9 aa, synthetic construct
  REGION 1..9: note = Synthetic
GSIFSIKDM

SEQ ID NO: 1084 - protein, 9 aa, synthetic construct
  REGION 1..9: note = Synthetic
RSIFSINVM

SEQ ID NO: 1085 - protein, 9 aa, synthetic construct
  REGION 1..9: note = Synthetic
GFTFSRAAM

SEQ ID NO: 1086 - protein, 9 aa, synthetic construct
  REGION 1..9: note = Synthetic
RSIVSDNVM

SEQ ID NO: 1087 - protein, 9 aa, synthetic construct
  REGION 1..9: note = Synthetic
GRTFSRYGM

SEQ ID NO: 1088 - protein, 9 aa, synthetic construct
  REGION 1..9: note = Synthetic
GRTYSSYAM

SEQ ID NO: 1089 - protein, 9 aa, synthetic construct
  REGION 1..9: note = Synthetic
GRTFSSYAM

SEQ ID NO: 1090 - protein, 9 aa, synthetic construct
  REGION 1..9: note = Synthetic
RSIVSINVM

SEQ ID NO: 1091 - protein, 9 aa, synthetic construct
  REGION 1..9: note = Synthetic
RSIFSINVW

SEQ ID NO: 1092 - protein, 9 aa, synthetic construct
  REGION 1..9: note = Synthetic
GRTFSRYGM

SEQ ID NO: 1093 - protein, 9 aa, synthetic construct
  REGION 1..9: note = Synthetic
GRTFSRYGM

SEQ ID NO: 1094 - protein, 9 aa, synthetic construct
  REGION 1..9: note = Synthetic
GRTFSRYGM

SEQ ID NO: 1095 - protein, 9 aa, synthetic construct
  REGION 1..9: note = Synthetic
GRTFSSYAM

SEQ ID NO: 1096 - protein, 9 aa, synthetic construct
  REGION 1..9: note = Synthetic
GRTFSSYAM

SEQ ID NO: 1097 - protein, 9 aa, synthetic construct
  REGION 1..9: note = Synthetic
GRTFSSYAM

SEQ ID NO: 1098 - protein, 9 aa, synthetic construct
  REGION 1..9: note = Synthetic
RSIFSANVM

SEQ ID NO: 1099 - protein, 9 aa, synthetic construct
  REGION 1..9: note = Synthetic
GSIFSIRDM

SEQ ID NO: 1100 - protein, 12 aa, synthetic construct
  REGION 1..12: note = Synthetic
GPTFSSYAMYAM

SEQ ID NO: 1101 - protein, 9 aa, synthetic construct
  REGION 1..9: note = Synthetic
GRTFSSYAM

SEQ ID NO: 1102 - protein, 9 aa, synthetic construct
  REGION 1..9: note = Synthetic
GRTFSRYGM

SEQ ID NO: 1103 - protein, 9 aa, synthetic construct
  REGION 1..9: note = Synthetic
RSIFSINVM

SEQ ID NO: 1104 - protein, 9 aa, synthetic construct
  REGION 1..9: note = Synthetic
GRAFSTYTM

SEQ ID NO: 1105 - protein, 9 aa, synthetic construct
  REGION 1..9: note = Synthetic
GRIFSINVM

SEQ ID NO: 1106 - protein, 9 aa, synthetic construct
  REGION 1..9: note = Synthetic
GITFSSYAM

SEQ ID NO: 1107 - protein, 9 aa, synthetic construct
  REGION 1..9: note = Synthetic
GGIFSFNVM

SEQ ID NO: 1108 - protein, 9 aa, synthetic construct
  REGION 1..9: note = Synthetic
GHTFSSYIM

SEQ ID NO: 1109 - protein, 9 aa, synthetic construct
  REGION 1..9: note = Synthetic
GRTFSSYAM

SEQ ID NO: 1110 - protein, 9 aa, synthetic construct
  REGION 1..9: note = Synthetic
GRTFSSYAM

SEQ ID NO: 1111 - protein, 9 aa, synthetic construct
  REGION 1..9: note = Synthetic
RSIFRENVM

SEQ ID NO: 1112 - protein, 9 aa, synthetic construct
  REGION 1..9: note = Synthetic
GRTFSMYTM

SEQ ID NO: 1113 - protein, 9 aa, synthetic construct
  REGION 1..9: note = Synthetic
GGTFSRYGM

SEQ ID NO: 1114 - protein, 9 aa, synthetic construct
  REGION 1..9: note = Synthetic
GGTFSRYGM

SEQ ID NO: 1115 - protein, 9 aa, synthetic construct
  REGION 1..9: note = Synthetic
RGTFSRYGM

SEQ ID NO: 1116 - protein, 9 aa, synthetic construct
  REGION 1..9: note = Synthetic
GRTFSRLGM

SEQ ID NO: 1117 - protein, 9 aa, synthetic construct
  REGION 1..9: note = Synthetic
GGTFSRYGM

SEQ ID NO: 1118 - protein, 9 aa, synthetic construct
  REGION 1..9: note = Synthetic
GGTFSRYGM

SEQ ID NO: 1119 - protein, 9 aa, synthetic construct
  REGION 1..9: note = Synthetic
GSSGSIKDM

SEQ ID NO: 1120 - protein, 9 aa, synthetic construct
  REGION 1..9: note = Synthetic
GSSGSIKDM

SEQ ID NO: 1121 - protein, 9 aa, synthetic construct
  REGION 1..9: note = Synthetic
GRSFSSYTM

SEQ ID NO: 1122 - protein, 9 aa, synthetic construct
  REGION 1..9: note = Synthetic
GGTFSRYGM

SEQ ID NO: 1123 - protein, 9 aa, synthetic construct
  REGION 1..9: note = Synthetic
GRTFSNYAM

SEQ ID NO: 1124 - protein, 9 aa, synthetic construct
  REGION 1..9: note = Synthetic
GGTFSRYGM

SEQ ID NO: 1125 - protein, 9 aa, synthetic construct
  REGION 1..9: note = Synthetic
GRTFSSYAM

SEQ ID NO: 1126 - protein, 9 aa, synthetic construct
  REGION 1..9: note = Synthetic
GRTFSSYAM

SEQ ID NO: 1127 - protein, 9 aa, synthetic construct
  REGION 1..9: note = Synthetic
GRTFSRYGM

SEQ ID NO: 1128 - protein, 9 aa, synthetic construct
  REGION 1..9: note = Synthetic
GRTFSHYAM

SEQ ID NO: 1129 - protein, 9 aa, synthetic construct
  REGION 1..9: note = Synthetic
GRTASSAAM

SEQ ID NO: 1130 - protein, 9 aa, synthetic construct
  REGION 1..9: note = Synthetic
GRTFSTYAM

SEQ ID NO: 1131 - protein, 9 aa, synthetic construct
  REGION 1..9: note = Synthetic
GRTLSRYGM

SEQ ID NO: 1132 - protein, 9 aa, synthetic construct
  REGION 1..9: note = Synthetic
GGTFSRYGL

SEQ ID NO: 1133 - protein, 9 aa, synthetic construct
  REGION 1..9: note = Synthetic
EGTFSRYGM

SEQ ID NO: 1134 - protein, 9 aa, synthetic construct
  REGION 1..9: note = Synthetic
GRTFSMYTM

SEQ ID NO: 1135 - protein, 9 aa, synthetic construct
  REGION 1..9: note = Synthetic
GRTFSTGAM

SEQ ID NO: 1136 - protein, 9 aa, synthetic construct
  REGION 1..9: note = Synthetic
EGTFSRYGM

SEQ ID NO: 1137 - protein, 9 aa, synthetic construct
  REGION 1..9: note = Synthetic
GSIFSINVM

SEQ ID NO: 1138 - protein, 9 aa, synthetic construct
  REGION 1..9: note = Synthetic
GRTFSHYAM

SEQ ID NO: 1139 - protein, 9 aa, synthetic construct
  REGION 1..9: note = Synthetic
GSSGSMKDM

SEQ ID NO: 1140 - protein, 9 aa, synthetic construct
  REGION 1..9: note = Synthetic
GRTFSHYAM

SEQ ID NO: 1141 - protein, 9 aa, synthetic construct
  REGION 1..9: note = Synthetic
GRTFSTYAM

SEQ ID NO: 1142 - protein, 9 aa, synthetic construct
  REGION 1..9: note = Synthetic
GSIFSSDDM

SEQ ID NO: 1143 - protein, 9 aa, synthetic construct
  REGION 1..9: note = Synthetic
GRTFSSYTM

SEQ ID NO: 1144 - protein, 9 aa, synthetic construct
  REGION 1..9: note = Synthetic
GSIFSDDIW

SEQ ID NO: 1145 - protein, 9 aa, synthetic construct
  REGION 1..9: note = Synthetic
GSIGSINVM

SEQ ID NO: 1146 - protein, 9 aa, synthetic construct
  REGION 1..9: note = Synthetic
GDTLSRYGM

SEQ ID NO: 1147 - protein, 9 aa, synthetic construct
  REGION 1..9: note = Synthetic
GSIFSINVM

SEQ ID NO: 1148 - protein, 9 aa, synthetic construct
  REGION 1..9: note = Synthetic
GSIGSINVM

SEQ ID NO: 1149 - protein, 9 aa, synthetic construct
  REGION 1..9: note = Synthetic
GGTFSRYGM

SEQ ID NO: 1150 - protein, 9 aa, synthetic construct
  REGION 1..9: note = Synthetic
GSTFSINRV

SEQ ID NO: 1151 - protein, 9 aa, synthetic construct
  REGION 1..9: note = Synthetic
GRTFSSYAM

SEQ ID NO: 1152 - protein, 9 aa, synthetic construct
  REGION 1..9: note = Synthetic
GGTFSSYPM

SEQ ID NO: 1153 - protein, 9 aa, synthetic construct
  REGION 1..9: note = Synthetic
GRTLSSYIM

SEQ ID NO: 1154 - protein, 9 aa, synthetic construct
  REGION 1..9: note = Synthetic
GFSLDDYAI

SEQ ID NO: 1155 - protein, 8 aa, synthetic construct
  REGION 1..8: note = Synthetic
NIFSINLM

SEQ ID NO: 1156 - protein, 9 aa, synthetic construct
  REGION 1..9: note = Synthetic
GGTFSSYPM

SEQ ID NO: 1157 - protein, 9 aa, synthetic construct
  REGION 1..9: note = Synthetic
GRTFSSYVM

SEQ ID NO: 1158 - protein, 9 aa, synthetic construct
  REGION 1..9: note = Synthetic
GRTFSNYVM

SEQ ID NO: 1159 - protein, 8 aa, synthetic construct
  REGION 1..8: note = Synthetic
NIFSINLM

SEQ ID NO: 1160 - protein, 9 aa, synthetic construct
  REGION 1..9: note = Synthetic
GGTFSSYPM

SEQ ID NO: 1161 - protein, 9 aa, synthetic construct
  REGION 1..9: note = Synthetic
GRTFSSYVM

SEQ ID NO: 1162 - protein, 9 aa, synthetic construct
  REGION 1..9: note = Synthetic
GRTLSSYAM

SEQ ID NO: 1163 - protein, 9 aa, synthetic construct
  REGION 1..9: note = Synthetic
GRTFSSYAM

SEQ ID NO: 1164 - protein, 9 aa, synthetic construct
  REGION 1..9: note = Synthetic
GRTFSGSGM

SEQ ID NO: 1165 - protein, 8 aa, synthetic construct
  REGION 1..8: note = Synthetic
NIFSINVM

SEQ ID NO: 1166 - protein, 8 aa, synthetic construct
  REGION 1..8: note = Synthetic
NIFSINVM

SEQ ID NO: 1167 - protein, 8 aa, synthetic construct
  REGION 1..8: note = Synthetic
NIFSINLM

SEQ ID NO: 1168 - protein, 9 aa, synthetic construct
  REGION 1..9: note = Synthetic
GGTFSNYAM

SEQ ID NO: 1169 - protein, 9 aa, synthetic construct
  REGION 1..9: note = Synthetic
GRTFSGSGM

SEQ ID NO: 1170 - protein, 9 aa, synthetic construct
  REGION 1..9: note = Synthetic
GRTLSDYIM

SEQ ID NO: 1171 - protein, 9 aa, synthetic construct
  REGION 1..9: note = Synthetic
GRTFSGSPM

SEQ ID NO: 1172 - protein, 8 aa, synthetic construct
  REGION 1..8: note = Synthetic
NVLSINLM

SEQ ID NO: 1173 - protein, 9 aa, synthetic construct
  REGION 1..9: note = Synthetic
GRAFSRYTM

SEQ ID NO: 1174 - protein, 9 aa, synthetic construct
  REGION 1..9: note = Synthetic
GRTLSNYIM

SEQ ID NO: 1175 - protein, 9 aa, synthetic construct
  REGION 1..9: note = Synthetic
GRTLSSYIM

SEQ ID NO: 1176 - protein, 9 aa, synthetic construct
  REGION 1..9: note = Synthetic
GGTFSNYVM

SEQ ID NO: 1177 - protein, 9 aa, synthetic construct
  REGION 1..9: note = Synthetic
GRTFSTYGM

SEQ ID NO: 1178 - protein, 9 aa, synthetic construct
  REGION 1..9: note = Synthetic
GRTFSTYAM

SEQ ID NO: 1179 - protein, 9 aa, synthetic construct
  REGION 1..9: note = Synthetic
GRTFSSGAM

SEQ ID NO: 1180 - protein, 9 aa, synthetic construct
  REGION 1..9: note = Synthetic
GRTFRSYGV

SEQ ID NO: 1181 - protein, 9 aa, synthetic construct
  REGION 1..9: note = Synthetic
GFTFSRYAM

SEQ ID NO: 1182 - protein, 9 aa, synthetic construct
  REGION 1..9: note = Synthetic
GRTISNYTM

SEQ ID NO: 1183 - protein, 9 aa, synthetic construct
  REGION 1..9: note = Synthetic
GFTFSNYAM

SEQ ID NO: 1184 - protein, 9 aa, synthetic construct
  REGION 1..9: note = Synthetic
GRTFSTYGM

SEQ ID NO: 1185 - protein, 9 aa, synthetic construct
  REGION 1..9: note = Synthetic
GFTFSSYSM

SEQ ID NO: 1186 - protein, 9 aa, synthetic construct
  REGION 1..9: note = Synthetic
GRTFSSGAM

SEQ ID NO: 1187 - protein, 9 aa, synthetic construct
  REGION 1..9: note = Synthetic
GRTFRSYGV

SEQ ID NO: 1188 - protein, 9 aa, synthetic construct
  REGION 1..9: note = Synthetic
GRTFSSYGM

SEQ ID NO: 1189 - protein, 9 aa, synthetic construct
  REGION 1..9: note = Synthetic
GGTFSNYVM

SEQ ID NO: 1190 - protein, 9 aa, synthetic construct
  REGION 1..9: note = Synthetic
GHTFSTYGM

SEQ ID NO: 1191 - protein, 9 aa, synthetic construct
  REGION 1..9: note = Synthetic
GRTFSSYGM

SEQ ID NO: 1192 - protein, 9 aa, synthetic construct
  REGION 1..9: note = Synthetic
GRTFSSYVM

SEQ ID NO: 1193 - protein, 9 aa, synthetic construct
  REGION 1..9: note = Synthetic
GRTFSNYAM

SEQ ID NO: 1194 - protein, 9 aa, synthetic construct
  REGION 1..9: note = Synthetic
GGTFSSYVM

SEQ ID NO: 1195 - protein, 9 aa, synthetic construct
  REGION 1..9: note = Synthetic
GRTFSNYIM

SEQ ID NO: 1196 - protein, 9 aa, synthetic construct
  REGION 1..9: note = Synthetic
GRTFSSYAM

SEQ ID NO: 1197 - protein, 9 aa, synthetic construct
  REGION 1..9: note = Synthetic
GRTFSSYVM

SEQ ID NO: 1198 - protein, 9 aa, synthetic construct
  REGION 1..9: note = Synthetic
GRTGGSFDM

SEQ ID NO: 1199 - protein, 9 aa, synthetic construct
  REGION 1..9: note = Synthetic
GNIFSISLM

SEQ ID NO: 1200 - protein, 9 aa, synthetic construct
  REGION 1..9: note = Synthetic
GRTFKIYGV

SEQ ID NO: 1201 - protein, 9 aa, synthetic construct
  REGION 1..9: note = Synthetic
ARTFSEYIM

SEQ ID NO: 1202 - protein, 9 aa, synthetic construct
  REGION 1..9: note = Synthetic
GHTFSTYGM

SEQ ID NO: 1203 - protein, 9 aa, synthetic construct
  REGION 1..9: note = Synthetic
GLTLNNYAL

SEQ ID NO: 1204 - protein, 9 aa, synthetic construct
  REGION 1..9: note = Synthetic
GRTFSTYGM

SEQ ID NO: 1205 - protein, 9 aa, synthetic construct
  REGION 1..9: note = Synthetic
GGSLSNYIV

SEQ ID NO: 1206 - protein, 9 aa, synthetic construct
  REGION 1..9: note = Synthetic
GRTFSSGAM

SEQ ID NO: 1207 - protein, 9 aa, synthetic construct
  REGION 1..9: note = Synthetic
GFNLNYYAI

SEQ ID NO: 1208 - protein, 7 aa, synthetic construct
  REGION 1..7: note = Synthetic
TFSSGAM

SEQ ID NO: 1209 - protein, 9 aa, synthetic construct
  REGION 1..9: note = Synthetic
GRTFRMYGV

SEQ ID NO: 1210 - protein, 9 aa, synthetic construct
  REGION 1..9: note = Synthetic
GFTWNNYGM

SEQ ID NO: 1211 - protein, 7 aa, synthetic construct
  REGION 1..7: note = Synthetic
TFSFGAM

SEQ ID NO: 1212 - protein, 9 aa, synthetic construct
  REGION 1..9: note = Synthetic
GRTFSDYIM

SEQ ID NO: 1213 - protein, 9 aa, synthetic construct
  REGION 1..9: note = Synthetic
GFTFDDYAI

SEQ ID NO: 1214 - protein, 7 aa, synthetic construct
  REGION 1..7: note = Synthetic
TFSFGAM

SEQ ID NO: 1215 - protein, 9 aa, synthetic construct
  REGION 1..9: note = Synthetic
GRTFTMYGV

SEQ ID NO: 1216 - protein, 9 aa, synthetic construct
  REGION 1..9: note = Synthetic
GRTFSSGAM

SEQ ID NO: 1217 - protein, 7 aa, synthetic construct
  REGION 1..7: note = Synthetic
TFSSGAM

SEQ ID NO: 1218 - protein, 9 aa, synthetic construct
  REGION 1..9: note = Synthetic
GRTFSTYGM

SEQ ID NO: 1219 - protein, 9 aa, synthetic construct
  REGION 1..9: note = Synthetic
GRTFSDYVM

SEQ ID NO: 1220 - protein, 9 aa, synthetic construct
  REGION 1..9: note = Synthetic
GRTFSSYAM

SEQ ID NO: 1221 - protein, 9 aa, synthetic construct
  REGION 1..9: note = Synthetic
GGTFSSYIM

SEQ ID NO: 1222 - protein, 9 aa, synthetic construct
  REGION 1..9: note = Synthetic
GRTLSNYAM

SEQ ID NO: 1223 - protein, 8 aa, synthetic construct
  REGION 1..8: note = Synthetic
NIFSIALM

SEQ ID NO: 1224 - protein, 9 aa, synthetic construct
  REGION 1..9: note = Synthetic
GRTFSTYGM

SEQ ID NO: 1225 - protein, 9 aa, synthetic construct
  REGION 1..9: note = Synthetic
GRTFSDYEM

SEQ ID NO: 1226 - protein, 9 aa, synthetic construct
  REGION 1..9: note = Synthetic
GDTFSAYGM

SEQ ID NO: 1227 - protein, 8 aa, synthetic construct
  REGION 1..8: note = Synthetic
RTASTSTM

SEQ ID NO: 1228 - protein, 9 aa, synthetic construct
  REGION 1..9: note = Synthetic
GRTFSDYAM

SEQ ID NO: 1229 - protein, 9 aa, synthetic construct
  REGION 1..9: note = Synthetic
GRTFSGYIM

SEQ ID NO: 1230 - protein, 9 aa, synthetic construct
  REGION 1..9: note = Synthetic
GSTLSTYAF

SEQ ID NO: 1231 - protein, 8 aa, synthetic construct
  REGION 1..8: note = Synthetic
GSIFGYAM

SEQ ID NO: 1232 - protein, 9 aa, synthetic construct
  REGION 1..9: note = Synthetic
GSIFGIKAM

SEQ ID NO: 1233 - protein, 9 aa, synthetic construct
  REGION 1..9: note = Synthetic
GFTPVYYAI

SEQ ID NO: 1234 - protein, 9 aa, synthetic construct
  REGION 1..9: note = Synthetic
LNSGSIAGM

SEQ ID NO: 1235 - protein, 9 aa, synthetic construct
  REGION 1..9: note = Synthetic
GSTFSNYAM

SEQ ID NO: 1236 - protein, 9 aa, synthetic construct
  REGION 1..9: note = Synthetic
GSTLSTYAF

SEQ ID NO: 1237 - protein, 9 aa, synthetic construct
  REGION 1..9: note = Synthetic
GITFSAYAM

SEQ ID NO: 1238 - protein, 9 aa, synthetic construct
  REGION 1..9: note = Synthetic
GITFSAYAM

SEQ ID NO: 1239 - protein, 8 aa, synthetic construct
  REGION 1..8: note = Synthetic
GSIAPYAM

SEQ ID NO: 1240 - protein, 9 aa, synthetic construct
  REGION 1..9: note = Synthetic
GSTFSSYVM

SEQ ID NO: 1241 - protein, 9 aa, synthetic construct
  REGION 1..9: note = Synthetic
GTTLSNYAM

SEQ ID NO: 1242 - protein, 9 aa, synthetic construct
  REGION 1..9: note = Synthetic
LNSGSIAGM

SEQ ID NO: 1243 - protein, 8 aa, synthetic construct
  REGION 1..8: note = Synthetic
IAWSGGRT

SEQ ID NO: 1244 - protein, 8 aa, synthetic construct
  REGION 1..8: note = Synthetic
ISTGGTST

SEQ ID NO: 1245 - protein, 6 aa, synthetic construct
  REGION 1..6: note = Synthetic
ISWSGT

SEQ ID NO: 1246 - protein, 6 aa, synthetic construct
  REGION 1..6: note = Synthetic
ISWSGT

SEQ ID NO: 1247 - protein, 6 aa, synthetic construct
  REGION 1..6: note = Synthetic
ISWSGT

SEQ ID NO: 1248 - protein, 8 aa, synthetic construct
  REGION 1..8: note = Synthetic
ISTNAYST

SEQ ID NO: 1249 - protein, 6 aa, synthetic construct
  REGION 1..6: note = Synthetic
ISWSGT

SEQ ID NO: 1250 - protein, 6 aa, synthetic construct
  REGION 1..6: note = Synthetic
ISWSGT

SEQ ID NO: 1251 - protein, 6 aa, synthetic construct
  REGION 1..6: note = Synthetic
ISWSGT

SEQ ID NO: 1252 - protein, 6 aa, synthetic construct
  REGION 1..6: note = Synthetic
ISWSGT

SEQ ID NO: 1253 - protein, 6 aa, synthetic construct
  REGION 1..6: note = Synthetic
ISWSGT

SEQ ID NO: 1254 - protein, 6 aa, synthetic construct
  REGION 1..6: note = Synthetic
ISWSGT

SEQ ID NO: 1255 - protein, 8 aa, synthetic construct
  REGION 1..8: note = Synthetic
LSGSGATT

SEQ ID NO: 1256 - protein, 7 aa, synthetic construct
  REGION 1..7: note = Synthetic
ITWSGDT

SEQ ID NO: 1257 - protein, 7 aa, synthetic construct
  REGION 1..7: note = Synthetic
ITNGGAT

SEQ ID NO: 1258 - protein, 6 aa, synthetic construct
  REGION 1..6: note = Synthetic
ISWSGT

SEQ ID NO: 1259 - protein, 8 aa, synthetic construct
  REGION 1..8: note = Synthetic
ISGVTAFT

SEQ ID NO: 1260 - protein, 6 aa, synthetic construct
  REGION 1..6: note = Synthetic
ISWSGT

SEQ ID NO: 1261 - protein, 6 aa, synthetic construct
  REGION 1..6: note = Synthetic
ISWSGT

SEQ ID NO: 1262 - protein, 6 aa, synthetic construct
  REGION 1..6: note = Synthetic
ISWSGT

SEQ ID NO: 1263 - protein, 7 aa, synthetic construct
  REGION 1..7: note = Synthetic
ISRAGAT

SEQ ID NO: 1264 - protein, 7 aa, synthetic construct
  REGION 1..7: note = Synthetic
ATSGGMT

SEQ ID NO: 1265 - protein, 8 aa, synthetic construct
  REGION 1..8: note = Synthetic
SNWNDGGT

SEQ ID NO: 1266 - protein, 8 aa, synthetic construct
  REGION 1..8: note = Synthetic
ISSSGIST

SEQ ID NO: 1267 - protein, 7 aa, synthetic construct
  REGION 1..7: note = Synthetic
SWSASST

SEQ ID NO: 1268 - protein, 8 aa, synthetic construct
  REGION 1..8: note = Synthetic
VSWTGSST

SEQ ID NO: 1269 - protein, 8 aa, synthetic construct
  REGION 1..8: note = Synthetic
VTWDGGTT

SEQ ID NO: 1270 - protein, 7 aa, synthetic construct
  REGION 1..7: note = Synthetic
VSSDGTT

SEQ ID NO: 1271 - protein, 8 aa, synthetic construct
  REGION 1..8: note = Synthetic
IERSGGAT

SEQ ID NO: 1272 - protein, 7 aa, synthetic construct
  REGION 1..7: note = Synthetic
IAWTAST

SEQ ID NO: 1273 - protein, 7 aa, synthetic construct
  REGION 1..7: note = Synthetic
ITGRGRT

SEQ ID NO: 1274 - protein, 9 aa, synthetic construct
  REGION 1..9: note = Synthetic
ITSGGTTNY

SEQ ID NO: 1275 - protein, 7 aa, synthetic construct
  REGION 1..7: note = Synthetic
ITSYGST

SEQ ID NO: 1276 - protein, 7 aa, synthetic construct
  REGION 1..7: note = Synthetic
ITNGGST

SEQ ID NO: 1277 - protein, 8 aa, synthetic construct
  REGION 1..8: note = Synthetic
INRSGGTT

SEQ ID NO: 1278 - protein, 6 aa, synthetic construct
  REGION 1..6: note = Synthetic
STGGAT

SEQ ID NO: 1279 - protein, 8 aa, synthetic construct
  REGION 1..8: note = Synthetic
INWSGDST

SEQ ID NO: 1280 - protein, 7 aa, synthetic construct
  REGION 1..7: note = Synthetic
IGRGGTT

SEQ ID NO: 1281 - protein, 7 aa, synthetic construct
  REGION 1..7: note = Synthetic
ISRAGAT

SEQ ID NO: 1282 - protein, 7 aa, synthetic construct
  REGION 1..7: note = Synthetic
IARSGAT

SEQ ID NO: 1283 - protein, 7 aa, synthetic construct
  REGION 1..7: note = Synthetic
ITSGGVT

SEQ ID NO: 1284 - protein, 7 aa, synthetic construct
  REGION 1..7: note = Synthetic
ITRGGAT

SEQ ID NO: 1285 - protein, 8 aa, synthetic construct
  REGION 1..8: note = Synthetic
ITWSGEVT

SEQ ID NO: 1286 - protein, 5 aa, synthetic construct
  REGION 1..5: note = Synthetic
RGGRI

SEQ ID NO: 1287 - protein, 7 aa, synthetic construct
  REGION 1..7: note = Synthetic
STNGGST

SEQ ID NO: 1288 - protein, 7 aa, synthetic construct
  REGION 1..7: note = Synthetic
LYRSGGT

SEQ ID NO: 1289 - protein, 8 aa, synthetic construct
  REGION 1..8: note = Synthetic
LKRDGNRT

SEQ ID NO: 1290 - protein, 8 aa, synthetic construct
  REGION 1..8: note = Synthetic
ISGSGGIT

SEQ ID NO: 1291 - protein, 8 aa, synthetic construct
  REGION 1..8: note = Synthetic
ILSGTTRP

SEQ ID NO: 1292 - protein, 7 aa, synthetic construct
  REGION 1..7: note = Synthetic
LYRDGNT

SEQ ID NO: 1293 - protein, 8 aa, synthetic construct
  REGION 1..8: note = Synthetic
LTRLGGRT

SEQ ID NO: 1294 - protein, 8 aa, synthetic construct
  REGION 1..8: note = Synthetic
LKRDGIRT

SEQ ID NO: 1295 - protein, 6 aa, synthetic construct
  REGION 1..6: note = Synthetic
YRSGGT

SEQ ID NO: 1296 - protein, 7 aa, synthetic construct
  REGION 1..7: note = Synthetic
ITSGGQT

SEQ ID NO: 1297 - protein, 8 aa, synthetic construct
  REGION 1..8: note = Synthetic
IRENGGRT

SEQ ID NO: 1298 - protein, 6 aa, synthetic construct
  REGION 1..6: note = Synthetic
STAGAT

SEQ ID NO: 1299 - protein, 7 aa, synthetic construct
  REGION 1..7: note = Synthetic
TWNEGST

SEQ ID NO: 1300 - protein, 8 aa, synthetic construct
  REGION 1..8: note = Synthetic
INGRGDST

SEQ ID NO: 1301 - protein, 6 aa, synthetic construct
  REGION 1..6: note = Synthetic
TTGASP

SEQ ID NO: 1302 - protein, 8 aa, synthetic construct
  REGION 1..8: note = Synthetic
ISASGMIT

SEQ ID NO: 1303 - protein, 8 aa, synthetic construct
  REGION 1..8: note = Synthetic
FSNSDGNI

SEQ ID NO: 1304 - protein, 7 aa, synthetic construct
  REGION 1..7: note = Synthetic
ITNGGTT

SEQ ID NO: 1305 - protein, 7 aa, synthetic construct
  REGION 1..7: note = Synthetic
IFSDGST

SEQ ID NO: 1306 - protein, 8 aa, synthetic construct
  REGION 1..8: note = Synthetic
ISASGSMT

SEQ ID NO: 1307 - protein, 8 aa, synthetic construct
  REGION 1..8: note = Synthetic
ISSSGAYT

SEQ ID NO: 1308 - protein, 7 aa, synthetic construct
  REGION 1..7: note = Synthetic
IDYSGST

SEQ ID NO: 1309 - protein, 8 aa, synthetic construct
  REGION 1..8: note = Synthetic
INWSGGIT

SEQ ID NO: 1310 - protein, 8 aa, synthetic construct
  REGION 1..8: note = Synthetic
ISRSGGTT

SEQ ID NO: 1311 - protein, 7 aa, synthetic construct
  REGION 1..7: note = Synthetic
IFSDGST

SEQ ID NO: 1312 - protein, 7 aa, synthetic construct
  REGION 1..7: note = Synthetic
IFKDGST

SEQ ID NO: 1313 - protein, 8 aa, synthetic construct
  REGION 1..8: note = Synthetic
ISRSGGYT

SEQ ID NO: 1314 - protein, 7 aa, synthetic construct
  REGION 1..7: note = Synthetic
IFSDGST

SEQ ID NO: 1315 - protein, 8 aa, synthetic construct
  REGION 1..8: note = Synthetic
ISSSGAYE

SEQ ID NO: 1316 - protein, 8 aa, synthetic construct
  REGION 1..8: note = Synthetic
ISRSGGTE

SEQ ID NO: 1317 - protein, 7 aa, synthetic construct
  REGION 1..7: note = Synthetic
IFKDGST

SEQ ID NO: 1318 - protein, 7 aa, synthetic construct
  REGION 1..7: note = Synthetic
IFKDGTT

SEQ ID NO: 1319 - protein, 7 aa, synthetic construct
  REGION 1..7: note = Synthetic
IFKDGST

SEQ ID NO: 1320 - protein, 8 aa, synthetic construct
  REGION 1..8: note = Synthetic
ISSSGGLT

SEQ ID NO: 1321 - protein, 8 aa, synthetic construct
  REGION 1..8: note = Synthetic
ISSSDGWT

SEQ ID NO: 1322 - protein, 8 aa, synthetic construct
  REGION 1..8: note = Synthetic
ITWSGGST

SEQ ID NO: 1323 - protein, 8 aa, synthetic construct
  REGION 1..8: note = Synthetic
ISRSGAMT

SEQ ID NO: 1324 - protein, 8 aa, synthetic construct
  REGION 1..8: note = Synthetic
ISSSGNYM

SEQ ID NO: 1325 - protein, 8 aa, synthetic construct
  REGION 1..8: note = Synthetic
ISSSDGST

SEQ ID NO: 1326 - protein, 7 aa, synthetic construct
  REGION 1..7: note = Synthetic
SLPDGST

SEQ ID NO: 1327 - protein, 7 aa, synthetic construct
  REGION 1..7: note = Synthetic
IFSDGTT

SEQ ID NO: 1328 - protein, 8 aa, synthetic construct
  REGION 1..8: note = Synthetic
ISQGGGAT

SEQ ID NO: 1329 - protein, 8 aa, synthetic construct
  REGION 1..8: note = Synthetic
ISQGGAAT

SEQ ID NO: 1330 - protein, 8 aa, synthetic construct
  REGION 1..8: note = Synthetic
IMSSDGYT

SEQ ID NO: 1331 - protein, 7 aa, synthetic construct
  REGION 1..7: note = Synthetic
IFEDGTT

SEQ ID NO: 1332 - protein, 8 aa, synthetic construct
  REGION 1..8: note = Synthetic
ISWSGSIT

SEQ ID NO: 1333 - protein, 8 aa, synthetic construct
  REGION 1..8: note = Synthetic
ISSSDGST

SEQ ID NO: 1334 - protein, 8 aa, synthetic construct
  REGION 1..8: note = Synthetic
ISPSGGMT

SEQ ID NO: 1335 - protein, 8 aa, synthetic construct
  REGION 1..8: note = Synthetic
ISRSGGLT

SEQ ID NO: 1336 - protein, 7 aa, synthetic construct
  REGION 1..7: note = Synthetic
IFSDGTT

SEQ ID NO: 1337 - protein, 7 aa, synthetic construct
  REGION 1..7: note = Synthetic
IDYSGST

SEQ ID NO: 1338 - protein, 8 aa, synthetic construct
  REGION 1..8: note = Synthetic
ISQGGAAT

SEQ ID NO: 1339 - protein, 7 aa, synthetic construct
  REGION 1..7: note = Synthetic
IFSDGTT

SEQ ID NO: 1340 - protein, 7 aa, synthetic construct
  REGION 1..7: note = Synthetic
IDYSGNT

SEQ ID NO: 1341 - protein, 7 aa, synthetic construct
  REGION 1..7: note = Synthetic
SFSDGTT

SEQ ID NO: 1342 - protein, 7 aa, synthetic construct
  REGION 1..7: note = Synthetic
IDYSGST

SEQ ID NO: 1343 - protein, 7 aa, synthetic construct
  REGION 1..7: note = Synthetic
IDYSGNT

SEQ ID NO: 1344 - protein, 7 aa, synthetic construct
  REGION 1..7: note = Synthetic
IDYSGNT

SEQ ID NO: 1345 - protein, 7 aa, synthetic construct
  REGION 1..7: note = Synthetic
ILSDGST

SEQ ID NO: 1346 - protein, 7 aa, synthetic construct
  REGION 1..7: note = Synthetic
IFGDGST

SEQ ID NO: 1347 - protein, 8 aa, synthetic construct
  REGION 1..8: note = Synthetic
IEGSGGST

SEQ ID NO: 1348 - protein, 8 aa, synthetic construct
  REGION 1..8: note = Synthetic
ISRSGGYT

SEQ ID NO: 1349 - protein, 8 aa, synthetic construct
  REGION 1..8: note = Synthetic
ISSSDGST

SEQ ID NO: 1350 - protein, 7 aa, synthetic construct
  REGION 1..7: note = Synthetic
IFEDGST

SEQ ID NO: 1351 - protein, 7 aa, synthetic construct
  REGION 1..7: note = Synthetic
IDYSGST

SEQ ID NO: 1352 - protein, 7 aa, synthetic construct
  REGION 1..7: note = Synthetic
VFEDGST

SEQ ID NO: 1353 - protein, 8 aa, synthetic construct
  REGION 1..8: note = Synthetic
ISRSAGHT

SEQ ID NO: 1354 - protein, 7 aa, synthetic construct
  REGION 1..7: note = Synthetic
IFEDGTT

SEQ ID NO: 1355 - protein, 8 aa, synthetic construct
  REGION 1..8: note = Synthetic
ISASGSTT

SEQ ID NO: 1356 - protein, 8 aa, synthetic construct
  REGION 1..8: note = Synthetic
IMTSDDYT

SEQ ID NO: 1357 - protein, 7 aa, synthetic construct
  REGION 1..7: note = Synthetic
ITTGGTT

SEQ ID NO: 1358 - protein, 8 aa, synthetic construct
  REGION 1..8: note = Synthetic
ITRGGSTY

SEQ ID NO: 1359 - protein, 8 aa, synthetic construct
  REGION 1..8: note = Synthetic
IDSDGGTT

SEQ ID NO: 1360 - protein, 8 aa, synthetic construct
  REGION 1..8: note = Synthetic
ITRGGSTY

SEQ ID NO: 1361 - protein, 8 aa, synthetic construct
  REGION 1..8: note = Synthetic
ISWSGDST

SEQ ID NO: 1362 - protein, 8 aa, synthetic construct
  REGION 1..8: note = Synthetic
ISWSGGST

SEQ ID NO: 1363 - protein, 8 aa, synthetic construct
  REGION 1..8: note = Synthetic
ISWSDEDT

SEQ ID NO: 1364 - protein, 8 aa, synthetic construct
  REGION 1..8: note = Synthetic
ITRGGSTY

SEQ ID NO: 1365 - protein, 8 aa, synthetic construct
  REGION 1..8: note = Synthetic
ITRGGSTY

SEQ ID NO: 1366 - protein, 8 aa, synthetic construct
  REGION 1..8: note = Synthetic
ISWSGDST

SEQ ID NO: 1367 - protein, 8 aa, synthetic construct
  REGION 1..8: note = Synthetic
ISWSGGST

SEQ ID NO: 1368 - protein, 8 aa, synthetic construct
  REGION 1..8: note = Synthetic
ISWSGGST

SEQ ID NO: 1369 - protein, 7 aa, synthetic construct
  REGION 1..7: note = Synthetic
IRSGNST

SEQ ID NO: 1370 - protein, 8 aa, synthetic construct
  REGION 1..8: note = Synthetic
ISWSGGST

SEQ ID NO: 1371 - protein, 8 aa, synthetic construct
  REGION 1..8: note = Synthetic
ISWSGSNT

SEQ ID NO: 1372 - protein, 8 aa, synthetic construct
  REGION 1..8: note = Synthetic
ITRGSSTY

SEQ ID NO: 1373 - protein, 7 aa, synthetic construct
  REGION 1..7: note = Synthetic
ISSGGST

SEQ ID NO: 1374 - protein, 8 aa, synthetic construct
  REGION 1..8: note = Synthetic
VSLTDGSK

SEQ ID NO: 1375 - protein, 8 aa, synthetic construct
  REGION 1..8: note = Synthetic
ISWSGSNT

SEQ ID NO: 1376 - protein, 8 aa, synthetic construct
  REGION 1..8: note = Synthetic
ISWSGGST

SEQ ID NO: 1377 - protein, 8 aa, synthetic construct
  REGION 1..8: note = Synthetic
ITRGGSTY

SEQ ID NO: 1378 - protein, 8 aa, synthetic construct
  REGION 1..8: note = Synthetic
ISWTGGST

SEQ ID NO: 1379 - protein, 8 aa, synthetic construct
  REGION 1..8: note = Synthetic
ITRGGSTY

SEQ ID NO: 1380 - protein, 8 aa, synthetic construct
  REGION 1..8: note = Synthetic
ISTSGGST

SEQ ID NO: 1381 - protein, 8 aa, synthetic construct
  REGION 1..8: note = Synthetic
ITRGGSTY

SEQ ID NO: 1382 - protein, 8 aa, synthetic construct
  REGION 1..8: note = Synthetic
IRWSSGTT

SEQ ID NO: 1383 - protein, 7 aa, synthetic construct
  REGION 1..7: note = Synthetic
IRSGDST

SEQ ID NO: 1384 - protein, 8 aa, synthetic construct
  REGION 1..8: note = Synthetic
ISWSGAST

SEQ ID NO: 1385 - protein, 8 aa, synthetic construct
  REGION 1..8: note = Synthetic
ITRGSSTY

SEQ ID NO: 1386 - protein, 8 aa, synthetic construct
  REGION 1..8: note = Synthetic
ISGSAGST

SEQ ID NO: 1387 - protein, 8 aa, synthetic construct
  REGION 1..8: note = Synthetic
ISWSGDST

SEQ ID NO: 1388 - protein, 8 aa, synthetic construct
  REGION 1..8: note = Synthetic
ISWSGDST

SEQ ID NO: 1389 - protein, 8 aa, synthetic construct
  REGION 1..8: note = Synthetic
ISWSGDST

SEQ ID NO: 1390 - protein, 8 aa, synthetic construct
  REGION 1..8: note = Synthetic
ISWSGDMT

SEQ ID NO: 1391 - protein, 8 aa, synthetic construct
  REGION 1..8: note = Synthetic
ISWSGDSK

SEQ ID NO: 1392 - protein, 8 aa, synthetic construct
  REGION 1..8: note = Synthetic
ISWSGDST

SEQ ID NO: 1393 - protein, 7 aa, synthetic construct
  REGION 1..7: note = Synthetic
ISTGGTT

SEQ ID NO: 1394 - protein, 7 aa, synthetic construct
  REGION 1..7: note = Synthetic
ITTGGTT

SEQ ID NO: 1395 - protein, 8 aa, synthetic construct
  REGION 1..8: note = Synthetic
VTWNGEVP

SEQ ID NO: 1396 - protein, 8 aa, synthetic construct
  REGION 1..8: note = Synthetic
ISWSGGST

SEQ ID NO: 1397 - protein, 8 aa, synthetic construct
  REGION 1..8: note = Synthetic
ISRSGGST

SEQ ID NO: 1398 - protein, 8 aa, synthetic construct
  REGION 1..8: note = Synthetic
ISWSGDNT

SEQ ID NO: 1399 - protein, 8 aa, synthetic construct
  REGION 1..8: note = Synthetic
ISRSGAST

SEQ ID NO: 1400 - protein, 8 aa, synthetic construct
  REGION 1..8: note = Synthetic
IARSGSST

SEQ ID NO: 1401 - protein, 8 aa, synthetic construct
  REGION 1..8: note = Synthetic
ISWSGDST

SEQ ID NO: 1402 - protein, 8 aa, synthetic construct
  REGION 1..8: note = Synthetic
IRTSAGIT

SEQ ID NO: 1403 - protein, 8 aa, synthetic construct
  REGION 1..8: note = Synthetic
ISWSGGST

SEQ ID NO: 1404 - protein, 8 aa, synthetic construct
  REGION 1..8: note = Synthetic
ISRSGAST

SEQ ID NO: 1405 - protein, 8 aa, synthetic construct
  REGION 1..8: note = Synthetic
ISWSGDRT

SEQ ID NO: 1406 - protein, 8 aa, synthetic construct
  REGION 1..8: note = Synthetic
ISWSGDRT

SEQ ID NO: 1407 - protein, 8 aa, synthetic construct
  REGION 1..8: note = Synthetic
ISWSGDST

SEQ ID NO: 1408 - protein, 8 aa, synthetic construct
  REGION 1..8: note = Synthetic
ISGSAGST

SEQ ID NO: 1409 - protein, 8 aa, synthetic construct
  REGION 1..8: note = Synthetic
ISWSGGST

SEQ ID NO: 1410 - protein, 8 aa, synthetic construct
  REGION 1..8: note = Synthetic
ISWSGDRT

SEQ ID NO: 1411 - protein, 7 aa, synthetic construct
  REGION 1..7: note = Synthetic
ATSGGQT

SEQ ID NO: 1412 - protein, 8 aa, synthetic construct
  REGION 1..8: note = Synthetic
IRGNAGIT

SEQ ID NO: 1413 - protein, 7 aa, synthetic construct
  REGION 1..7: note = Synthetic
ITTGGTT

SEQ ID NO: 1414 - protein, 8 aa, synthetic construct
  REGION 1..8: note = Synthetic
ISRSGGST

SEQ ID NO: 1415 - protein, 8 aa, synthetic construct
  REGION 1..8: note = Synthetic
ISRSGGST

SEQ ID NO: 1416 - protein, 7 aa, synthetic construct
  REGION 1..7: note = Synthetic
ITSGGMT

SEQ ID NO: 1417 - protein, 8 aa, synthetic construct
  REGION 1..8: note = Synthetic
ISGSAGST

SEQ ID NO: 1418 - protein, 8 aa, synthetic construct
  REGION 1..8: note = Synthetic
ITRGSRPY

SEQ ID NO: 1419 - protein, 7 aa, synthetic construct
  REGION 1..7: note = Synthetic
VTSGGMT

SEQ ID NO: 1420 - protein, 8 aa, synthetic construct
  REGION 1..8: note = Synthetic
ITWSGSST

SEQ ID NO: 1421 - protein, 7 aa, synthetic construct
  REGION 1..7: note = Synthetic
ITSGGKS

SEQ ID NO: 1422 - protein, 7 aa, synthetic construct
  REGION 1..7: note = Synthetic
ATSGGMT

SEQ ID NO: 1423 - protein, 8 aa, synthetic construct
  REGION 1..8: note = Synthetic
ISWSGDRT

SEQ ID NO: 1424 - protein, 7 aa, synthetic construct
  REGION 1..7: note = Synthetic
IRSNGIT

SEQ ID NO: 1425 - protein, 8 aa, synthetic construct
  REGION 1..8: note = Synthetic
ISWSGGIT

SEQ ID NO: 1426 - protein, 8 aa, synthetic construct
  REGION 1..8: note = Synthetic
ISWSGGTT

SEQ ID NO: 1427 - protein, 8 aa, synthetic construct
  REGION 1..8: note = Synthetic
IAWSGSVT

SEQ ID NO: 1428 - protein, 9 aa, synthetic construct
  REGION 1..9: note = Synthetic
ISRTSDGST

SEQ ID NO: 1429 - protein, 7 aa, synthetic construct
  REGION 1..7: note = Synthetic
ITSGGNT

SEQ ID NO: 1430 - protein, 8 aa, synthetic construct
  REGION 1..8: note = Synthetic
ISWSGGGT

SEQ ID NO: 1431 - protein, 8 aa, synthetic construct
  REGION 1..8: note = Synthetic
ISWSGGVT

SEQ ID NO: 1432 - protein, 8 aa, synthetic construct
  REGION 1..8: note = Synthetic
ISWSGGTT

SEQ ID NO: 1433 - protein, 7 aa, synthetic construct
  REGION 1..7: note = Synthetic
ITSSGNT

SEQ ID NO: 1434 - protein, 8 aa, synthetic construct
  REGION 1..8: note = Synthetic
ISWSGGVT

SEQ ID NO: 1435 - protein, 8 aa, synthetic construct
  REGION 1..8: note = Synthetic
ISWSGGVT

SEQ ID NO: 1436 - protein, 8 aa, synthetic construct
  REGION 1..8: note = Synthetic
ISWSGGVT

SEQ ID NO: 1437 - protein, 8 aa, synthetic construct
  REGION 1..8: note = Synthetic
ISWSGGVT

SEQ ID NO: 1438 - protein, 8 aa, synthetic construct
  REGION 1..8: note = Synthetic
ISWTGSIT

SEQ ID NO: 1439 - protein, 7 aa, synthetic construct
  REGION 1..7: note = Synthetic
ITSGGNT

SEQ ID NO: 1440 - protein, 7 aa, synthetic construct
  REGION 1..7: note = Synthetic
ITSGGDT

SEQ ID NO: 1441 - protein, 7 aa, synthetic construct
  REGION 1..7: note = Synthetic
ITSGGHT

SEQ ID NO: 1442 - protein, 8 aa, synthetic construct
  REGION 1..8: note = Synthetic
ISWSGGVA

SEQ ID NO: 1443 - protein, 8 aa, synthetic construct
  REGION 1..8: note = Synthetic
ISWTGSIT

SEQ ID NO: 1444 - protein, 8 aa, synthetic construct
  REGION 1..8: note = Synthetic
IAWSGSTT

SEQ ID NO: 1445 - protein, 8 aa, synthetic construct
  REGION 1..8: note = Synthetic
ISWTGSIT

SEQ ID NO: 1446 - protein, 7 aa, synthetic construct
  REGION 1..7: note = Synthetic
ITSGGDT

SEQ ID NO: 1447 - protein, 15 aa, synthetic construct
  REGION 1..15: note = Synthetic
IDWSGGIDWSGGRST

SEQ ID NO: 1448 - protein, 8 aa, synthetic construct
  REGION 1..8: note = Synthetic
IAWSGSVT

SEQ ID NO: 1449 - protein, 8 aa, synthetic construct
  REGION 1..8: note = Synthetic
IGWSGSTT

SEQ ID NO: 1450 - protein, 8 aa, synthetic construct
  REGION 1..8: note = Synthetic
ISWSGGST

SEQ ID NO: 1451 - protein, 8 aa, synthetic construct
  REGION 1..8: note = Synthetic
ISASGGGT

SEQ ID NO: 1452 - protein, 8 aa, synthetic construct
  REGION 1..8: note = Synthetic
IRWNTGST

SEQ ID NO: 1453 - protein, 8 aa, synthetic construct
  REGION 1..8: note = Synthetic
ISRSGSST

SEQ ID NO: 1454 - protein, 8 aa, synthetic construct
  REGION 1..8: note = Synthetic
ISSSGGGT

SEQ ID NO: 1455 - protein, 8 aa, synthetic construct
  REGION 1..8: note = Synthetic
ITSAGGST

SEQ ID NO: 1456 - protein, 8 aa, synthetic construct
  REGION 1..8: note = Synthetic
INPSGGAT

SEQ ID NO: 1457 - protein, 8 aa, synthetic construct
  REGION 1..8: note = Synthetic
ITSTGGST

SEQ ID NO: 1458 - protein, 8 aa, synthetic construct
  REGION 1..8: note = Synthetic
ISASGGGT

SEQ ID NO: 1459 - protein, 8 aa, synthetic construct
  REGION 1..8: note = Synthetic
SSGGGDIT

SEQ ID NO: 1460 - protein, 8 aa, synthetic construct
  REGION 1..8: note = Synthetic
ISRSGSGT

SEQ ID NO: 1461 - protein, 8 aa, synthetic construct
  REGION 1..8: note = Synthetic
ISWSGGGT

SEQ ID NO: 1462 - protein, 8 aa, synthetic construct
  REGION 1..8: note = Synthetic
ISTSGGGT

SEQ ID NO: 1463 - protein, 8 aa, synthetic construct
  REGION 1..8: note = Synthetic
ISWSGGNA

SEQ ID NO: 1464 - protein, 8 aa, synthetic construct
  REGION 1..8: note = Synthetic
ISASGGGT

SEQ ID NO: 1465 - protein, 8 aa, synthetic construct
  REGION 1..8: note = Synthetic
ISRSGGGT

SEQ ID NO: 1466 - protein, 8 aa, synthetic construct
  REGION 1..8: note = Synthetic
ISWSGGVT

SEQ ID NO: 1467 - protein, 8 aa, synthetic construct
  REGION 1..8: note = Synthetic
ISWSGGIT

SEQ ID NO: 1468 - protein, 8 aa, synthetic construct
  REGION 1..8: note = Synthetic
ISWSGGVT

SEQ ID NO: 1469 - protein, 8 aa, synthetic construct
  REGION 1..8: note = Synthetic
ISWSGGVT

SEQ ID NO: 1470 - protein, 8 aa, synthetic construct
  REGION 1..8: note = Synthetic
ISWSGGIT

SEQ ID NO: 1471 - protein, 8 aa, synthetic construct
  REGION 1..8: note = Synthetic
ISWSGGVT

SEQ ID NO: 1472 - protein, 8 aa, synthetic construct
  REGION 1..8: note = Synthetic
ITWSGGST

SEQ ID NO: 1473 - protein, 7 aa, synthetic construct
  REGION 1..7: note = Synthetic
ITSGGNT

SEQ ID NO: 1474 - protein, 8 aa, synthetic construct
  REGION 1..8: note = Synthetic
ISSSGGGT

SEQ ID NO: 1475 - protein, 8 aa, synthetic construct
  REGION 1..8: note = Synthetic
ISSSGATT

SEQ ID NO: 1476 - protein, 8 aa, synthetic construct
  REGION 1..8: note = Synthetic
ISASGGGT

SEQ ID NO: 1477 - protein, 8 aa, synthetic construct
  REGION 1..8: note = Synthetic
ISAGGDII

SEQ ID NO: 1478 - protein, 8 aa, synthetic construct
  REGION 1..8: note = Synthetic
ISASGGGT

SEQ ID NO: 1479 - protein, 8 aa, synthetic construct
  REGION 1..8: note = Synthetic
ISWSGEVT

SEQ ID NO: 1480 - protein, 8 aa, synthetic construct
  REGION 1..8: note = Synthetic
ISRSGSRT

SEQ ID NO: 1481 - protein, 8 aa, synthetic construct
  REGION 1..8: note = Synthetic
ISSSDGST

SEQ ID NO: 1482 - protein, 8 aa, synthetic construct
  REGION 1..8: note = Synthetic
ISRSSSRT

SEQ ID NO: 1483 - protein, 8 aa, synthetic construct
  REGION 1..8: note = Synthetic
ISSSGAGT

SEQ ID NO: 1484 - protein, 8 aa, synthetic construct
  REGION 1..8: note = Synthetic
INSGGDII

SEQ ID NO: 1485 - protein, 8 aa, synthetic construct
  REGION 1..8: note = Synthetic
ISRSVSRT

SEQ ID NO: 1486 - protein, 8 aa, synthetic construct
  REGION 1..8: note = Synthetic
ISWSGGVT

SEQ ID NO: 1487 - protein, 8 aa, synthetic construct
  REGION 1..8: note = Synthetic
IERSGSST

SEQ ID NO: 1488 - protein, 8 aa, synthetic construct
  REGION 1..8: note = Synthetic
ISRSVSRT

SEQ ID NO: 1489 - protein, 8 aa, synthetic construct
  REGION 1..8: note = Synthetic
ISSSGGGT

SEQ ID NO: 1490 - protein, 8 aa, synthetic construct
  REGION 1..8: note = Synthetic
ISRSGSTT

SEQ ID NO: 1491 - protein, 8 aa, synthetic construct
  REGION 1..8: note = Synthetic
ISRSSSRT

SEQ ID NO: 1492 - protein, 8 aa, synthetic construct
  REGION 1..8: note = Synthetic
ISASGGGT

SEQ ID NO: 1493 - protein, 8 aa, synthetic construct
  REGION 1..8: note = Synthetic
ISWSGGVT

SEQ ID NO: 1494 - protein, 8 aa, synthetic construct
  REGION 1..8: note = Synthetic
ISWSGGIT

SEQ ID NO: 1495 - protein, 8 aa, synthetic construct
  REGION 1..8: note = Synthetic
ISWSGGVT

SEQ ID NO: 1496 - protein, 8 aa, synthetic construct
  REGION 1..8: note = Synthetic
ISGSGSNT

SEQ ID NO: 1497 - protein, 7 aa, synthetic construct
  REGION 1..7: note = Synthetic
ITSGGNT

SEQ ID NO: 1498 - protein, 8 aa, synthetic construct
  REGION 1..8: note = Synthetic
ISASGGGT

SEQ ID NO: 1499 - protein, 8 aa, synthetic construct
  REGION 1..8: note = Synthetic
ISGSGGTT

SEQ ID NO: 1500 - protein, 8 aa, synthetic construct
  REGION 1..8: note = Synthetic
ISSGGGGT

SEQ ID NO: 1501 - skipped

SEQ ID NO: 1502 - protein, 8 aa, synthetic construct
  REGION 1..8: note = Synthetic
ISWSGGVT

SEQ ID NO: 1503 - protein, 8 aa, synthetic construct
  REGION 1..8: note = Synthetic
ISSSGATT

SEQ ID NO: 1504 - protein, 7 aa, synthetic construct
  REGION 1..7: note = Synthetic
ISRGGKT

SEQ ID NO: 1505 - protein, 7 aa, synthetic construct
  REGION 1..7: note = Synthetic
ISRGGTP

SEQ ID NO: 1506 - protein, 7 aa, synthetic construct
  REGION 1..7: note = Synthetic
ITEGGTT

SEQ ID NO: 1507 - protein, 8 aa, synthetic construct
  REGION 1..8: note = Synthetic
ISSVDGKT

SEQ ID NO: 1508 - protein, 7 aa, synthetic construct
  REGION 1..7: note = Synthetic
ITRGGSS

SEQ ID NO: 1509 - protein, 7 aa, synthetic construct
  REGION 1..7: note = Synthetic
ISRGGVA

SEQ ID NO: 1510 - protein, 7 aa, synthetic construct
  REGION 1..7: note = Synthetic
ISRGGRT

SEQ ID NO: 1511 - protein, 7 aa, synthetic construct
  REGION 1..7: note = Synthetic
ISRAGIT

SEQ ID NO: 1512 - protein, 7 aa, synthetic construct
  REGION 1..7: note = Synthetic
ISRAGIT

SEQ ID NO: 1513 - protein, 7 aa, synthetic construct
  REGION 1..7: note = Synthetic
ISRGSLP

SEQ ID NO: 1514 - protein, 7 aa, synthetic construct
  REGION 1..7: note = Synthetic
ISSGGST

SEQ ID NO: 1515 - protein, 7 aa, synthetic construct
  REGION 1..7: note = Synthetic
ISRGGTP

SEQ ID NO: 1516 - protein, 7 aa, synthetic construct
  REGION 1..7: note = Synthetic
ITRGGSS

SEQ ID NO: 1517 - protein, 17 aa, synthetic construct
  REGION 1..17: note = Synthetic
AGYRGVLFITTKSAYDY

SEQ ID NO: 1518 - protein, 10 aa, synthetic construct
  REGION 1..10: note = Synthetic
AKLVAYGMDY

SEQ ID NO: 1519 - protein, 15 aa, synthetic construct
  REGION 1..15: note = Synthetic
AVGSRRLYYSSDINY

SEQ ID NO: 1520 - protein, 15 aa, synthetic construct
  REGION 1..15: note = Synthetic
VVGSRRLYYSSDINY

SEQ ID NO: 1521 - protein, 15 aa, synthetic construct
  REGION 1..15: note = Synthetic
AQGSRRLYYSSDIDY

SEQ ID NO: 1522 - protein, 13 aa, synthetic construct
  REGION 1..13: note = Synthetic
ARGGTAQEGGMDY

SEQ ID NO: 1523 - protein, 15 aa, synthetic construct
  REGION 1..15: note = Synthetic
AVGSRRLYYSSDIDY

SEQ ID NO: 1524 - protein, 15 aa, synthetic construct
  REGION 1..15: note = Synthetic
ASGSRRLYYSSDIDY

SEQ ID NO: 1525 - protein, 15 aa, synthetic construct
  REGION 1..15: note = Synthetic
ASGSRRLYYSSDIDY

SEQ ID NO: 1526 - protein, 15 aa, synthetic construct
  REGION 1..15: note = Synthetic
VVGSRRLYYSSDIDY

SEQ ID NO: 1527 - protein, 15 aa, synthetic construct
  REGION 1..15: note = Synthetic
AVGSRRLYYSSDIDY

SEQ ID NO: 1528 - protein, 15 aa, synthetic construct
  REGION 1..15: note = Synthetic
AVGSRRLYYSSDINY

SEQ ID NO: 1529 - protein, 16 aa, synthetic construct
  REGION 1..16: note = Synthetic
AASGHFGLRGTYNYEY

SEQ ID NO: 1530 - protein, 13 aa, synthetic construct
  REGION 1..13: note = Synthetic
AADRIYNEDRYYY

SEQ ID NO: 1531 - protein, 10 aa, synthetic construct
  REGION 1..10: note = Synthetic
AADHFGRTPY

SEQ ID NO: 1532 - protein, 15 aa, synthetic construct
  REGION 1..15: note = Synthetic
AVGSRRLYYSSDIDY

SEQ ID NO: 1533 - protein, 16 aa, synthetic construct
  REGION 1..16: note = Synthetic
AARQWNPTMRERDYDY

SEQ ID NO: 1534 - protein, 15 aa, synthetic construct
  REGION 1..15: note = Synthetic
AVGTRRLYYSSDIDY

SEQ ID NO: 1535 - protein, 15 aa, synthetic construct
  REGION 1..15: note = Synthetic
AAGSRRLHYSSDIDY

SEQ ID NO: 1536 - protein, 15 aa, synthetic construct
  REGION 1..15: note = Synthetic
VVGSRRLYYSSDINY

SEQ ID NO: 1537 - protein, 10 aa, synthetic construct
  REGION 1..10: note = Synthetic
FASVFDAGTY

SEQ ID NO: 1538 - protein, 17 aa, synthetic construct
  REGION 1..17: note = Synthetic
NAAQSRTSRLFPDEYDY

SEQ ID NO: 1539 - protein, 16 aa, synthetic construct
  REGION 1..16: note = Synthetic
AARSGGSYTYTGSYHY

SEQ ID NO: 1540 - protein, 17 aa, synthetic construct
  REGION 1..17: note = Synthetic
AASRAATVGVTPQEYAY

SEQ ID NO: 1541 - protein, 22 aa, synthetic construct
  REGION 1..22: note = Synthetic
AMMGASYCAGYRCHHAAQTYDY

SEQ ID NO: 1542 - protein, 20 aa, synthetic construct
  REGION 1..20: note = Synthetic
AVKNTYGSSSYYYTSSSYDY

SEQ ID NO: 1543 - protein, 19 aa, synthetic construct
  REGION 1..19: note = Synthetic
AAGNTGPFNLLYSSAQYLY

SEQ ID NO: 1544 - protein, 18 aa, synthetic construct
  REGION 1..18: note = Synthetic
MGNLRRLDSGYADSYYYK

SEQ ID NO: 1545 - protein, 12 aa, synthetic construct
  REGION 1..12: note = Synthetic
AARLALAGEYDY

SEQ ID NO: 1546 - protein, 13 aa, synthetic construct
  REGION 1..13: note = Synthetic
VPIVGDSSWSGGS

SEQ ID NO: 1547 - protein, 13 aa, synthetic construct
  REGION 1..13: note = Synthetic
NEARNGLGSPANS

SEQ ID NO: 1548 - protein, 14 aa, synthetic construct
  REGION 1..14: note = Synthetic
NALVNQRDGLATYY

SEQ ID NO: 1549 - protein, 13 aa, synthetic construct
  REGION 1..13: note = Synthetic
HAVQGSTWWGSGS

SEQ ID NO: 1550 - protein, 13 aa, synthetic construct
  REGION 1..13: note = Synthetic
YANIREYYSSYEY

SEQ ID NO: 1551 - protein, 19 aa, synthetic construct
  REGION 1..19: note = Synthetic
AADRVGDDYYYISSQHYDY

SEQ ID NO: 1552 - protein, 5 aa, synthetic construct
  REGION 1..5: note = Synthetic
NTESY

SEQ ID NO: 1553 - protein, 17 aa, synthetic construct
  REGION 1..17: note = Synthetic
AVSTYSTYWFTPARYDY

SEQ ID NO: 1554 - protein, 12 aa, synthetic construct
  REGION 1..12: note = Synthetic
NVVPLRAGIDTY

SEQ ID NO: 1555 - protein, 10 aa, synthetic construct
  REGION 1..10: note = Synthetic
FASIIDAGTY

SEQ ID NO: 1556 - protein, 10 aa, synthetic construct
  REGION 1..10: note = Synthetic
YIDQRDVVPT

SEQ ID NO: 1557 - protein, 9 aa, synthetic construct
  REGION 1..9: note = Synthetic
HARSWSADY

SEQ ID NO: 1558 - protein, 7 aa, synthetic construct
  REGION 1..7: note = Synthetic
RIIGTDT

SEQ ID NO: 1559 - protein, 11 aa, synthetic construct
  REGION 1..11: note = Synthetic
AAGRAGTNWNY

SEQ ID NO: 1560 - protein, 9 aa, synthetic construct
  REGION 1..9: note = Synthetic
SALSSGKYY

SEQ ID NO: 1561 - protein, 14 aa, synthetic construct
  REGION 1..14: note = Synthetic
YAEVRHYSGNVDQY

SEQ ID NO: 1562 - protein, 9 aa, synthetic construct
  REGION 1..9: note = Synthetic
NVNWAESDS

SEQ ID NO: 1563 - protein, 19 aa, synthetic construct
  REGION 1..19: note = Synthetic
AARLPRPNAVVDTTSEYDY

SEQ ID NO: 1564 - protein, 11 aa, synthetic construct
  REGION 1..11: note = Synthetic
AVARFGGAWVY

SEQ ID NO: 1565 - protein, 10 aa, synthetic construct
  REGION 1..10: note = Synthetic
AARTVGGLPI

SEQ ID NO: 1566 - protein, 9 aa, synthetic construct
  REGION 1..9: note = Synthetic
NINWPLHDS

SEQ ID NO: 1567 - protein, 19 aa, synthetic construct
  REGION 1..19: note = Synthetic
AARLPRTNAVVDDISEYTY

SEQ ID NO: 1568 - protein, 19 aa, synthetic construct
  REGION 1..19: note = Synthetic
AARLPRTNAVVDSTSEYDY

SEQ ID NO: 1569 - protein, 9 aa, synthetic construct
  REGION 1..9: note = Synthetic
NVNWAESDS

SEQ ID NO: 1570 - protein, 13 aa, synthetic construct
  REGION 1..13: note = Synthetic
NARDATYYVEYNY

SEQ ID NO: 1571 - protein, 14 aa, synthetic construct
  REGION 1..14: note = Synthetic
AAGRDRYLRFSPDY

SEQ ID NO: 1572 - protein, 5 aa, synthetic construct
  REGION 1..5: note = Synthetic
NTESY

SEQ ID NO: 1573 - protein, 18 aa, synthetic construct
  REGION 1..18: note = Synthetic
AASTAGYGLGSSPNEYEY

SEQ ID NO: 1574 - protein, 17 aa, synthetic construct
  REGION 1..17: note = Synthetic
AVSFTSTFWFSPAQYDY

SEQ ID NO: 1575 - protein, 10 aa, synthetic construct
  REGION 1..10: note = Synthetic
VRERVGSKEY

SEQ ID NO: 1576 - protein, 14 aa, synthetic construct
  REGION 1..14: note = Synthetic
NAPRANSDWPRENS

SEQ ID NO: 1577 - protein, 17 aa, synthetic construct
  REGION 1..17: note = Synthetic
AVGYACDYHELRQRFSS

SEQ ID NO: 1578 - protein, 14 aa, synthetic construct
  REGION 1..14: note = Synthetic
NADERPYYGDAINS

SEQ ID NO: 1579 - protein, 5 aa, synthetic construct
  REGION 1..5: note = Synthetic
AMSGV

SEQ ID NO: 1580 - protein, 16 aa, synthetic construct
  REGION 1..16: note = Synthetic
AASTRPLCSRGGNYDY

SEQ ID NO: 1581 - protein, 16 aa, synthetic construct
  REGION 1..16: note = Synthetic
AARSGVCSRSSSDFGS

SEQ ID NO: 1582 - protein, 16 aa, synthetic construct
  REGION 1..16: note = Synthetic
ARSLRPVVTAKRDDEY

SEQ ID NO: 1583 - protein, 20 aa, synthetic construct
  REGION 1..20: note = Synthetic
AADLRVGASGPISFAWAYDY

SEQ ID NO: 1584 - protein, 20 aa, synthetic construct
  REGION 1..20: note = Synthetic
APVDITGPGRCPPARYEYGY

SEQ ID NO: 1585 - protein, 5 aa, synthetic construct
  REGION 1..5: note = Synthetic
ATSGI

SEQ ID NO: 1586 - protein, 5 aa, synthetic construct
  REGION 1..5: note = Synthetic
ATSGI

SEQ ID NO: 1587 - protein, 17 aa, synthetic construct
  REGION 1..17: note = Synthetic
AADAGNFPSRNPVTYGY

SEQ ID NO: 1588 - protein, 5 aa, synthetic construct
  REGION 1..5: note = Synthetic
ATSGI

SEQ ID NO: 1589 - protein, 24 aa, synthetic construct
  REGION 1..24: note = Synthetic
AAARGGCPPNTYYSGSSYFWEYDF

SEQ ID NO: 1590 - protein, 20 aa, synthetic construct
  REGION 1..20: note = Synthetic
APVDITGPGRCPPARYAYGS

SEQ ID NO: 1591 - protein, 5 aa, synthetic construct
  REGION 1..5: note = Synthetic
ATSGI

SEQ ID NO: 1592 - protein, 5 aa, synthetic construct
  REGION 1..5: note = Synthetic
AMSGV

SEQ ID NO: 1593 - protein, 5 aa, synthetic construct
  REGION 1..5: note = Synthetic
ATSGI

SEQ ID NO: 1594 - protein, 15 aa, synthetic construct
  REGION 1..15: note = Synthetic
GRVNYCARDMSAYDT

SEQ ID NO: 1595 - protein, 16 aa, synthetic construct
  REGION 1..16: note = Synthetic
AAAYDTAGWGAGGMDY

SEQ ID NO: 1596 - protein, 20 aa, synthetic construct
  REGION 1..20: note = Synthetic
AADTRRWAGGSSWYGEEYDY

SEQ ID NO: 1597 - protein, 16 aa, synthetic construct
  REGION 1..16: note = Synthetic
AATVKSVCFRGELYDY

SEQ ID NO: 1598 - protein, 17 aa, synthetic construct
  REGION 1..17: note = Synthetic
ARARSGCSRNMYDSTDY

SEQ ID NO: 1599 - protein, 25 aa, synthetic construct
  REGION 1..25: note = Synthetic
AAIGSGPLTAQGMCVMTRTPRDYDY

SEQ ID NO: 1600 - protein, 5 aa, synthetic construct
  REGION 1..5: note = Synthetic
ATSGV

SEQ ID NO: 1601 - protein, 5 aa, synthetic construct
  REGION 1..5: note = Synthetic
ATSGI

SEQ ID NO: 1602 - protein, 19 aa, synthetic construct
  REGION 1..19: note = Synthetic
AKGGLADGTGFYGSPGALI

SEQ ID NO: 1603 - protein, 19 aa, synthetic construct
  REGION 1..19: note = Synthetic
AQGGLADGSGFYGSPGALI

SEQ ID NO: 1604 - protein, 16 aa, synthetic construct
  REGION 1..16: note = Synthetic
AAAYDTAGWGADGMDY

SEQ ID NO: 1605 - protein, 5 aa, synthetic construct
  REGION 1..5: note = Synthetic
ATSGI

SEQ ID NO: 1606 - protein, 20 aa, synthetic construct
  REGION 1..20: note = Synthetic
AADIRVGASGPISFAWAYDY

SEQ ID NO: 1607 - protein, 25 aa, synthetic construct
  REGION 1..25: note = Synthetic
AAVGSGPLSAQGMCVMTRTSRDADY

SEQ ID NO: 1608 - protein, 16 aa, synthetic construct
  REGION 1..16: note = Synthetic
KVMPLCDRMWSPLGGS

SEQ ID NO: 1609 - protein, 16 aa, synthetic construct
  REGION 1..16: note = Synthetic
AAKQTQCSRWNPEYEY

SEQ ID NO: 1610 - protein, 5 aa, synthetic construct
  REGION 1..5: note = Synthetic
ATSGI

SEQ ID NO: 1611 - protein, 16 aa, synthetic construct
  REGION 1..16: note = Synthetic
ARSLRPVVTAKRDDEY

SEQ ID NO: 1612 - protein, 19 aa, synthetic construct
  REGION 1..19: note = Synthetic
AKGGLADGSGFYGSPGALI

SEQ ID NO: 1613 - protein, 5 aa, synthetic construct
  REGION 1..5: note = Synthetic
ATSGI

SEQ ID NO: 1614 - protein, 16 aa, synthetic construct
  REGION 1..16: note = Synthetic
ARSVRPVVTAKGDNEY

SEQ ID NO: 1615 - protein, 5 aa, synthetic construct
  REGION 1..5: note = Synthetic
ATSGI

SEQ ID NO: 1616 - protein, 16 aa, synthetic construct
  REGION 1..16: note = Synthetic
ARSVRPVVTAKSDDEY

SEQ ID NO: 1617 - protein, 16 aa, synthetic construct
  REGION 1..16: note = Synthetic
ARSVRPVVTAKSDNEY

SEQ ID NO: 1618 - protein, 16 aa, synthetic construct
  REGION 1..16: note = Synthetic
ARSVRPVVTAKRDNEY

SEQ ID NO: 1619 - protein, 5 aa, synthetic construct
  REGION 1..5: note = Synthetic
ATSGI

SEQ ID NO: 1620 - protein, 5 aa, synthetic construct
  REGION 1..5: note = Synthetic
AMSGV

SEQ ID NO: 1621 - protein, 20 aa, synthetic construct
  REGION 1..20: note = Synthetic
AVASSGSIGLCTVGRNAYNY

SEQ ID NO: 1622 - protein, 17 aa, synthetic construct
  REGION 1..17: note = Synthetic
AADAGNFPSRNPVTYGY

SEQ ID NO: 1623 - protein, 25 aa, synthetic construct
  REGION 1..25: note = Synthetic
AAVGSGPLSAQGMCVMTRTPRDYDY

SEQ ID NO: 1624 - protein, 5 aa, synthetic construct
  REGION 1..5: note = Synthetic
TTSGI

SEQ ID NO: 1625 - protein, 16 aa, synthetic construct
  REGION 1..16: note = Synthetic
ARSVRPVVTAKRDDEN

SEQ ID NO: 1626 - protein, 5 aa, synthetic construct
  REGION 1..5: note = Synthetic
TTSGI

SEQ ID NO: 1627 - protein, 16 aa, synthetic construct
  REGION 1..16: note = Synthetic
AAGQTQCTRWSSEYEY

SEQ ID NO: 1628 - protein, 5 aa, synthetic construct
  REGION 1..5: note = Synthetic
AMSGV

SEQ ID NO: 1629 - protein, 16 aa, synthetic construct
  REGION 1..16: note = Synthetic
ARTHQLCPRARSPYDA

SEQ ID NO: 1630 - protein, 16 aa, synthetic construct
  REGION 1..16: note = Synthetic
AAAYDTAGWGADGMDY

SEQ ID NO: 1631 - protein, 15 aa, synthetic construct
  REGION 1..15: note = Synthetic
GVLLNYRGPSSASYH

SEQ ID NO: 1632 - protein, 8 aa, synthetic construct
  REGION 1..8: note = Synthetic
NAVPARDR

SEQ ID NO: 1633 - protein, 13 aa, synthetic construct
  REGION 1..13: note = Synthetic
SLFRGYSAYDLRS

SEQ ID NO: 1634 - protein, 8 aa, synthetic construct
  REGION 1..8: note = Synthetic
NTVPARDR

SEQ ID NO: 1635 - protein, 20 aa, synthetic construct
  REGION 1..20: note = Synthetic
AASYNPGTIATIRREYEYDY

SEQ ID NO: 1636 - protein, 17 aa, synthetic construct
  REGION 1..17: note = Synthetic
AADRRTHVSDRLGEYDY

SEQ ID NO: 1637 - protein, 18 aa, synthetic construct
  REGION 1..18: note = Synthetic
AADRSYTVMVRQMRGMDY

SEQ ID NO: 1638 - protein, 8 aa, synthetic construct
  REGION 1..8: note = Synthetic
NTVPARDR

SEQ ID NO: 1639 - protein, 8 aa, synthetic construct
  REGION 1..8: note = Synthetic
NTVPARDH

SEQ ID NO: 1640 - protein, 20 aa, synthetic construct
  REGION 1..20: note = Synthetic
AASYNPGNIATIRREYEYDY

SEQ ID NO: 1641 - protein, 20 aa, synthetic construct
  REGION 1..20: note = Synthetic
AASYNPGNIATISREYEYDY

SEQ ID NO: 1642 - protein, 20 aa, synthetic construct
  REGION 1..20: note = Synthetic
AASYNPGTIATIRREYEYDY

SEQ ID NO: 1643 - protein, 17 aa, synthetic construct
  REGION 1..17: note = Synthetic
AADVVTHLATRFYEYDY

SEQ ID NO: 1644 - protein, 17 aa, synthetic construct
  REGION 1..17: note = Synthetic
AADRLTHYSDYPADFGS

SEQ ID NO: 1645 - protein, 17 aa, synthetic construct
  REGION 1..17: note = Synthetic
AADRLTHYSDYPADFDS

SEQ ID NO: 1646 - protein, 8 aa, synthetic construct
  REGION 1..8: note = Synthetic
NLVPARDR

SEQ ID NO: 1647 - protein, 15 aa, synthetic construct
  REGION 1..15: note = Synthetic
SVLTNPGWNRPLAYF

SEQ ID NO: 1648 - protein, 12 aa, synthetic construct
  REGION 1..12: note = Synthetic
AGDLDSDVGYEH

SEQ ID NO: 1649 - protein, 17 aa, synthetic construct
  REGION 1..17: note = Synthetic
AADRLTHYSDYPADFGS

SEQ ID NO: 1650 - protein, 20 aa, synthetic construct
  REGION 1..20: note = Synthetic
AASYNPGNIATIRREYEYDY

SEQ ID NO: 1651 - protein, 8 aa, synthetic construct
  REGION 1..8: note = Synthetic
NTVPARDR

SEQ ID NO: 1652 - protein, 18 aa, synthetic construct
  REGION 1..18: note = Synthetic
AEKARTAVDVRVTSGYDY

SEQ ID NO: 1653 - protein, 8 aa, synthetic construct
  REGION 1..8: note = Synthetic
NTVPARDR

SEQ ID NO: 1654 - protein, 14 aa, synthetic construct
  REGION 1..14: note = Synthetic
TARWDYPNTYEYDY

SEQ ID NO: 1655 - protein, 8 aa, synthetic construct
  REGION 1..8: note = Synthetic
NTVPARDR

SEQ ID NO: 1656 - protein, 12 aa, synthetic construct
  REGION 1..12: note = Synthetic
AADAGRDSIYDY

SEQ ID NO: 1657 - protein, 17 aa, synthetic construct
  REGION 1..17: note = Synthetic
AADVVTHIATRFYEYDY

SEQ ID NO: 1658 - protein, 17 aa, synthetic construct
  REGION 1..17: note = Synthetic
AADRLTHYSDYPRDFGS

SEQ ID NO: 1659 - protein, 8 aa, synthetic construct
  REGION 1..8: note = Synthetic
NLVPARDP

SEQ ID NO: 1660 - protein, 16 aa, synthetic construct
  REGION 1..16: note = Synthetic
ASEATHGTNRQLDYDY

SEQ ID NO: 1661 - protein, 19 aa, synthetic construct
  REGION 1..19: note = Synthetic
ASYNPGNIATIRREYEYDY

SEQ ID NO: 1662 - protein, 20 aa, synthetic construct
  REGION 1..20: note = Synthetic
AASYNPGTIATIRREYEYDY

SEQ ID NO: 1663 - protein, 20 aa, synthetic construct
  REGION 1..20: note = Synthetic
AASYNPGTIPTIRREYEYDY

SEQ ID NO: 1664 - protein, 20 aa, synthetic construct
  REGION 1..20: note = Synthetic
GASYNPGTIATIRREYEYDY

SEQ ID NO: 1665 - protein, 20 aa, synthetic construct
  REGION 1..20: note = Synthetic
AASYNPGNIATIRREYEYDY

SEQ ID NO: 1666 - protein, 20 aa, synthetic construct
  REGION 1..20: note = Synthetic
AASYNPGNIATIRREYEYDY

SEQ ID NO: 1667 - protein, 15 aa, synthetic construct
  REGION 1..15: note = Synthetic
SVLLNIRGPSSASYH

SEQ ID NO: 1668 - protein, 15 aa, synthetic construct
  REGION 1..15: note = Synthetic
NVLLNYRGPSSASYH

SEQ ID NO: 1669 - protein, 11 aa, synthetic construct
  REGION 1..11: note = Synthetic
AAGNPGRGYDY

SEQ ID NO: 1670 - protein, 20 aa, synthetic construct
  REGION 1..20: note = Synthetic
AASYNPGNIATIRREYEYDY

SEQ ID NO: 1671 - protein, 18 aa, synthetic construct
  REGION 1..18: note = Synthetic
AADSLRTHVSDRSYEYDS

SEQ ID NO: 1672 - protein, 19 aa, synthetic construct
  REGION 1..19: note = Synthetic
ASYNPGNIATIRREYEYDY

SEQ ID NO: 1673 - protein, 18 aa, synthetic construct
  REGION 1..18: note = Synthetic
AADSLRTHVSHVSYEYDS

SEQ ID NO: 1674 - protein, 18 aa, synthetic construct
  REGION 1..18: note = Synthetic
AADSLRTHVSDRSDEYDY

SEQ ID NO: 1675 - protein, 20 aa, synthetic construct
  REGION 1..20: note = Synthetic
GASYNPGNIATIRREYEYDY

SEQ ID NO: 1676 - protein, 19 aa, synthetic construct
  REGION 1..19: note = Synthetic
AIDDDYAYYPPSLLDRYDY

SEQ ID NO: 1677 - protein, 17 aa, synthetic construct
  REGION 1..17: note = Synthetic
AADRRTHVSDRLGEYDY

SEQ ID NO: 1678 - protein, 18 aa, synthetic construct
  REGION 1..18: note = Synthetic
AADSLRTHVSHVSYEYDS

SEQ ID NO: 1679 - protein, 19 aa, synthetic construct
  REGION 1..19: note = Synthetic
ASYNPGNIATIRREYEYDY

SEQ ID NO: 1680 - protein, 20 aa, synthetic construct
  REGION 1..20: note = Synthetic
GASYNPGNIATIRREYEYDY

SEQ ID NO: 1681 - protein, 20 aa, synthetic construct
  REGION 1..20: note = Synthetic
AASYNPGNIATIRREYEYDY

SEQ ID NO: 1682 - protein, 16 aa, synthetic construct
  REGION 1..16: note = Synthetic
SSTATHGTNRQLDYDY

SEQ ID NO: 1683 - protein, 17 aa, synthetic construct
  REGION 1..17: note = Synthetic
AASLLTHVSDRALEYDY

SEQ ID NO: 1684 - protein, 20 aa, synthetic construct
  REGION 1..20: note = Synthetic
AASYNPGNIATIRREYEYDY

SEQ ID NO: 1685 - protein, 13 aa, synthetic construct
  REGION 1..13: note = Synthetic
NGRSASYYPTYDY

SEQ ID NO: 1686 - protein, 19 aa, synthetic construct
  REGION 1..19: note = Synthetic
AIDLDYAYYPPSLVDRYDY

SEQ ID NO: 1687 - protein, 15 aa, synthetic construct
  REGION 1..15: note = Synthetic
NVLLNYRGPSSASYH

SEQ ID NO: 1688 - protein, 18 aa, synthetic construct
  REGION 1..18: note = Synthetic
AADSLRTHVSDRSYEYDS

SEQ ID NO: 1689 - protein, 18 aa, synthetic construct
  REGION 1..18: note = Synthetic
AADSLRTHVSDRSYEYDY

SEQ ID NO: 1690 - protein, 20 aa, synthetic construct
  REGION 1..20: note = Synthetic
NAFRSKVVDGIILKRRDYDY

SEQ ID NO: 1691 - protein, 16 aa, synthetic construct
  REGION 1..16: note = Synthetic
ASEATHGTNRQLDYDY

SEQ ID NO: 1692 - protein, 8 aa, synthetic construct
  REGION 1..8: note = Synthetic
NAVPARDR

SEQ ID NO: 1693 - protein, 13 aa, synthetic construct
  REGION 1..13: note = Synthetic
NGRSASYYPTYNY

SEQ ID NO: 1694 - protein, 18 aa, synthetic construct
  REGION 1..18: note = Synthetic
AGPNLGPITIMRDYEYDY

SEQ ID NO: 1695 - protein, 12 aa, synthetic construct
  REGION 1..12: note = Synthetic
GRSASYYPTYDY

SEQ ID NO: 1696 - protein, 13 aa, synthetic construct
  REGION 1..13: note = Synthetic
NGRSASYYPTYNY

SEQ ID NO: 1697 - protein, 20 aa, synthetic construct
  REGION 1..20: note = Synthetic
AASYNPGNIATIRREYEYDY

SEQ ID NO: 1698 - protein, 12 aa, synthetic construct
  REGION 1..12: note = Synthetic
NDPLAPFSSDAS

SEQ ID NO: 1699 - protein, 19 aa, synthetic construct
  REGION 1..19: note = Synthetic
AADARSDSGSYYYPADFGS

SEQ ID NO: 1700 - protein, 19 aa, synthetic construct
  REGION 1..19: note = Synthetic
AAQSGPYGSSSSWEADFGS

SEQ ID NO: 1701 - protein, 13 aa, synthetic construct
  REGION 1..13: note = Synthetic
AGDLHGIGYEYKY

SEQ ID NO: 1702 - protein, 20 aa, synthetic construct
  REGION 1..20: note = Synthetic
AAGFVCSGYGGGIRGYEYDY

SEQ ID NO: 1703 - protein, 6 aa, synthetic construct
  REGION 1..6: note = Synthetic
HCDWCS

SEQ ID NO: 1704 - protein, 17 aa, synthetic construct
  REGION 1..17: note = Synthetic
AADSPVGPSGLTTHWGY

SEQ ID NO: 1705 - protein, 19 aa, synthetic construct
  REGION 1..19: note = Synthetic
AADARSDSGRYYYPADFGS

SEQ ID NO: 1706 - protein, 18 aa, synthetic construct
  REGION 1..18: note = Synthetic
AAEHGAGSRWYFPEDFGS

SEQ ID NO: 1707 - protein, 6 aa, synthetic construct
  REGION 1..6: note = Synthetic
HCDWCS

SEQ ID NO: 1708 - protein, 19 aa, synthetic construct
  REGION 1..19: note = Synthetic
AAQSGPYGSSSSWEADFDS

SEQ ID NO: 1709 - protein, 18 aa, synthetic construct
  REGION 1..18: note = Synthetic
AAEVGYGSRWYYETDFGS

SEQ ID NO: 1710 - protein, 14 aa, synthetic construct
  REGION 1..14: note = Synthetic
AALPDGRSWYQADY

SEQ ID NO: 1711 - protein, 18 aa, synthetic construct
  REGION 1..18: note = Synthetic
AAENGYGSSWYFEADFGS

SEQ ID NO: 1712 - protein, 16 aa, synthetic construct
  REGION 1..16: note = Synthetic
ARATMGPTSRSDAYDY

SEQ ID NO: 1713 - protein, 6 aa, synthetic construct
  REGION 1..6: note = Synthetic
HCDWCS

SEQ ID NO: 1714 - protein, 6 aa, synthetic construct
  REGION 1..6: note = Synthetic
HCDWCS

SEQ ID NO: 1715 - protein, 6 aa, synthetic construct
  REGION 1..6: note = Synthetic
HCDWCS

SEQ ID NO: 1716 - protein, 18 aa, synthetic construct
  REGION 1..18: note = Synthetic
AAEVGYGTSWYYEADFGS

SEQ ID NO: 1717 - protein, 16 aa, synthetic construct
  REGION 1..16: note = Synthetic
ARSTVGPTSRSDAYDY

SEQ ID NO: 1718 - protein, 13 aa, synthetic construct
  REGION 1..13: note = Synthetic
AGDLHGIGYEYKY

SEQ ID NO: 1719 - protein, 16 aa, synthetic construct
  REGION 1..16: note = Synthetic
ARSTVGPTSRSDAYDY

SEQ ID NO: 1720 - protein, 6 aa, synthetic construct
  REGION 1..6: note = Synthetic
HCDWCS

SEQ ID NO: 1721 - protein, 19 aa, synthetic construct
  REGION 1..19: note = Synthetic
AAIDYPGTRPAVSANEYDY

SEQ ID NO: 1722 - protein, 13 aa, synthetic construct
  REGION 1..13: note = Synthetic
AGDLHGIGYEYAY

SEQ ID NO: 1723 - protein, 13 aa, synthetic construct
  REGION 1..13: note = Synthetic
AGDLQGIGYEYHN

SEQ ID NO: 1724 - protein, 18 aa, synthetic construct
  REGION 1..18: note = Synthetic
AAETGGGSRWYRTADFGS

SEQ ID NO: 1725 - protein, 15 aa, synthetic construct
  REGION 1..15: note = Synthetic
AADRTTWGRQTPYDY

SEQ ID NO: 1726 - protein, 18 aa, synthetic construct
  REGION 1..18: note = Synthetic
ALKRYGGGTSTYDQGYDT

SEQ ID NO: 1727 - protein, 18 aa, synthetic construct
  REGION 1..18: note = Synthetic
AASLGRAYETSASGAYDY

SEQ ID NO: 1728 - protein, 15 aa, synthetic construct
  REGION 1..15: note = Synthetic
AGAVRDWGRDAIYDS

SEQ ID NO: 1729 - protein, 15 aa, synthetic construct
  REGION 1..15: note = Synthetic
NAEMYSNADVMFNGY

SEQ ID NO: 1730 - protein, 19 aa, synthetic construct
  REGION 1..19: note = Synthetic
AAGSSHGRRWYIDGGRYDY

SEQ ID NO: 1731 - protein, 15 aa, synthetic construct
  REGION 1..15: note = Synthetic
NAEIYTHYDVMFNGY

SEQ ID NO: 1732 - protein, 15 aa, synthetic construct
  REGION 1..15: note = Synthetic
AAARTGWGRQTTHDY

SEQ ID NO: 1733 - protein, 7 aa, synthetic construct
  REGION 1..7: note = Synthetic
MRVSGDY

SEQ ID NO: 1734 - protein, 18 aa, synthetic construct
  REGION 1..18: note = Synthetic
AASLGRAYETSASGAYDY

SEQ ID NO: 1735 - protein, 15 aa, synthetic construct
  REGION 1..15: note = Synthetic
AGAVGDWGRDAIYDY

SEQ ID NO: 1736 - protein, 15 aa, synthetic construct
  REGION 1..15: note = Synthetic
AASSRGWGRGVSYDY

SEQ ID NO: 1737 - protein, 18 aa, synthetic construct
  REGION 1..18: note = Synthetic
AAETGYGNRWYAPADFGS

SEQ ID NO: 1738 - protein, 15 aa, synthetic construct
  REGION 1..15: note = Synthetic
AAARTGWGRQTTHDY

SEQ ID NO: 1739 - protein, 15 aa, synthetic construct
  REGION 1..15: note = Synthetic
AASSTGWGREDSYDY

SEQ ID NO: 1740 - protein, 19 aa, synthetic construct
  REGION 1..19: note = Synthetic
AASDSENSGSYYRNQDFGY

SEQ ID NO: 1741 - protein, 19 aa, synthetic construct
  REGION 1..19: note = Synthetic
AADRGTDSGSYYYTEDFGS

SEQ ID NO: 1742 - protein, 17 aa, synthetic construct
  REGION 1..17: note = Synthetic
AADRTAVVPAQIRSYNY

SEQ ID NO: 1743 - protein, 18 aa, synthetic construct
  REGION 1..18: note = Synthetic
AAEVGYGSSWYYEADFGS

SEQ ID NO: 1744 - protein, 15 aa, synthetic construct
  REGION 1..15: note = Synthetic
AADLEGAGNFREFGS

SEQ ID NO: 1745 - protein, 17 aa, synthetic construct
  REGION 1..17: note = Synthetic
AADRTAIVPAQIRSYDY

SEQ ID NO: 1746 - protein, 16 aa, synthetic construct
  REGION 1..16: note = Synthetic
AAGGFGALGVEHRYRY

SEQ ID NO: 1747 - protein, 6 aa, synthetic construct
  REGION 1..6: note = Synthetic
HCDWCS

SEQ ID NO: 1748 - protein, 13 aa, synthetic construct
  REGION 1..13: note = Synthetic
AVGGWGRDDIYDY

SEQ ID NO: 1749 - protein, 18 aa, synthetic construct
  REGION 1..18: note = Synthetic
AANRFLSAARYDRQRYDY

SEQ ID NO: 1750 - protein, 15 aa, synthetic construct
  REGION 1..15: note = Synthetic
AAARASWGRQTTHDY

SEQ ID NO: 1751 - protein, 6 aa, synthetic construct
  REGION 1..6: note = Synthetic
RVSGDY

SEQ ID NO: 1752 - protein, 15 aa, synthetic construct
  REGION 1..15: note = Synthetic
AAARTGWGRQTTYDY

SEQ ID NO: 1753 - protein, 17 aa, synthetic construct
  REGION 1..17: note = Synthetic
AGEHNGRSWYDVGNYAY

SEQ ID NO: 1754 - protein, 18 aa, synthetic construct
  REGION 1..18: note = Synthetic
AASLGRGYENSDSGAYDY

SEQ ID NO: 1755 - protein, 19 aa, synthetic construct
  REGION 1..19: note = Synthetic
AARAGGEFYYCSGDSSADY

SEQ ID NO: 1756 - protein, 18 aa, synthetic construct
  REGION 1..18: note = Synthetic
AASLSRGYETSDSGAYDY

SEQ ID NO: 1757 - protein, 15 aa, synthetic construct
  REGION 1..15: note = Synthetic
AGADRDWGRDAIYDY

SEQ ID NO: 1758 - protein, 7 aa, synthetic construct
  REGION 1..7: note = Synthetic
NRISGDY

SEQ ID NO: 1759 - protein, 18 aa, synthetic construct
  REGION 1..18: note = Synthetic
AASQGRGYETSATGAYDY

SEQ ID NO: 1760 - protein, 19 aa, synthetic construct
  REGION 1..19: note = Synthetic
AADGRSDSGGSYYPADFGS

SEQ ID NO: 1761 - protein, 19 aa, synthetic construct
  REGION 1..19: note = Synthetic
AGRVCSGYGGRIQGYEYDY

SEQ ID NO: 1762 - protein, 18 aa, synthetic construct
  REGION 1..18: note = Synthetic
AASQGRGYETSDTGAYDY

SEQ ID NO: 1763 - protein, 13 aa, synthetic construct
  REGION 1..13: note = Synthetic
AVGGWGRDDIYEY

SEQ ID NO: 1764 - protein, 18 aa, synthetic construct
  REGION 1..18: note = Synthetic
AASLGRGYENSDSGAYDY

SEQ ID NO: 1765 - protein, 18 aa, synthetic construct
  REGION 1..18: note = Synthetic
AASLSRAYETSDSGAYDY

SEQ ID NO: 1766 - protein, 15 aa, synthetic construct
  REGION 1..15: note = Synthetic
AAARTSWGRQTTHDY

SEQ ID NO: 1767 - protein, 19 aa, synthetic construct
  REGION 1..19: note = Synthetic
AADARSDSGRWYYPADFGS

SEQ ID NO: 1768 - protein, 19 aa, synthetic construct
  REGION 1..19: note = Synthetic
AADTGADSGSYYYPADFGS

SEQ ID NO: 1769 - protein, 19 aa, synthetic construct
  REGION 1..19: note = Synthetic
AADARSDSGRYYYPADFGS

SEQ ID NO: 1770 - protein, 15 aa, synthetic construct
  REGION 1..15: note = Synthetic
AAREGLALRYATYDY

SEQ ID NO: 1771 - protein, 6 aa, synthetic construct
  REGION 1..6: note = Synthetic
HCDWCS

SEQ ID NO: 1772 - protein, 15 aa, synthetic construct
  REGION 1..15: note = Synthetic
AVARTGWGREATHDY

SEQ ID NO: 1773 - protein, 17 aa, synthetic construct
  REGION 1..17: note = Synthetic
AARVPRVGRFDENEYEY

SEQ ID NO: 1774 - protein, 15 aa, synthetic construct
  REGION 1..15: note = Synthetic
ARAVRSWGRAAEHDY

SEQ ID NO: 1775 - protein, 21 aa, synthetic construct
  REGION 1..21: note = Synthetic
AASPRIWYRDTNYKRATWYDY

SEQ ID NO: 1776 - protein, 19 aa, synthetic construct
  REGION 1..19: note = Synthetic
AADARSDHASYYYPADFGF

SEQ ID NO: 1777 - protein, 18 aa, synthetic construct
  REGION 1..18: note = Synthetic
AADQFDSTARYDRRQYEY

SEQ ID NO: 1778 - protein, 10 aa, synthetic construct
  REGION 1..10: note = Synthetic
DTVGYYPEIR

SEQ ID NO: 1779 - protein, 7 aa, synthetic construct
  REGION 1..7: note = Synthetic
RCLGFDY

SEQ ID NO: 1780 - protein, 14 aa, synthetic construct
  REGION 1..14: note = Synthetic
NSLWSLLEQYPRYF

SEQ ID NO: 1781 - protein, 20 aa, synthetic construct
  REGION 1..20: note = Synthetic
AAEGPPYDPGQLCPYNDMDY

SEQ ID NO: 1782 - protein, 13 aa, synthetic construct
  REGION 1..13: note = Synthetic
AYRKDDFGFEVLY

SEQ ID NO: 1783 - protein, 10 aa, synthetic construct
  REGION 1..10: note = Synthetic
DTVGYYSEVR

SEQ ID NO: 1784 - protein, 10 aa, synthetic construct
  REGION 1..10: note = Synthetic
DTVGYYPEIR

SEQ ID NO: 1785 - protein, 7 aa, synthetic construct
  REGION 1..7: note = Synthetic
RTLGFAY

SEQ ID NO: 1786 - protein, 7 aa, synthetic construct
  REGION 1..7: note = Synthetic
RTLGFPY

SEQ ID NO: 1787 - protein, 6 aa, synthetic construct
  REGION 1..6: note = Synthetic
TLGFDY

SEQ ID NO: 1788 - protein, 10 aa, synthetic construct
  REGION 1..10: note = Synthetic
NLRDRFGHGY

SEQ ID NO: 1789 - protein, 7 aa, synthetic construct
  REGION 1..7: note = Synthetic
KILGFDV

SEQ ID NO: 1790 - protein, 14 aa, synthetic construct
  REGION 1..14: note = Synthetic
FAYRKDDFGFEVLY

SEQ ID NO: 1791 - protein, 129 aa, synthetic construct
  REGION 1..129: note = Synthetic
QVQLQQSGGGSVQAGGSLRLSCAASRPTISGYAMGWFRQAPGKEREFVAAISGSGASTGYSNSVKGRFTVFRDNTQDTVYLQMNSLKPEDTAIYFCAVYSAPDPTFDHYHMYSANYDNWGQGTQVTVSS

SEQ ID NO: 1792 - protein, 128 aa, synthetic construct
  REGION 1..128: note = Synthetic
QVQLQESGGGLVQAGTTLRLSCAVSGPTISSYAVGWFRQAPGKEREFVGVSWSASSTVYADSMKGRFAISRDNAKNTVSLQMNSLRPEDTAIYYCASMRASYCAGYRCHQRAQTYDYWGQGTQVTVSS

SEQ ID NO: 1793 - protein, 126 aa, synthetic construct
  REGION 1..126: note = Synthetic
QVQLQESGGGLVQAGDSLRVSCLASRRTLSSYVMGWFRQAPGKGREFVGGISKDGRSTRYANFVEGRFTVSRDNAKNTVYLQMNSLKPEDTATYYCAASDYNGGGIPSLRLDYNYWGQGTQVTVSS

SEQ ID NO: 1794 - protein, 115 aa, synthetic construct
  REGION 1..115: note = Synthetic
QVQLQQSGGGLVQAGGSLRLSCAATGSTNTFNKMDWYRQAPAKQRELVATPMSRGDPYYADSVKGRFTISGDNAKNAVYLQMNNLKPEDTAVYYCRGRIGERVYWGQGTQVTVSS

SEQ ID NO: 1795 - protein, 112 aa, synthetic construct
  REGION 1..112: note = Synthetic
QVQLQESGGGMVQAGGSLRLSCVASGRAIGELSMGWYRQAPGKQRELVARAIWSGGTVYGDSVRGRFTISRDSAKNTVYLQMNDLKPEDTALYYCNVGANYWGQGTQVTVSS

SEQ ID NO: 1796 - protein, 9 aa, synthetic construct
  REGION 1..9: note = Synthetic
RPTISGYAM

SEQ ID NO: 1797 - protein, 8 aa, synthetic construct
  REGION 1..8: note = Synthetic
PTISSYAV

SEQ ID NO: 1798 - protein, 9 aa, synthetic construct
  REGION 1..9: note = Synthetic
RRTLSSYVM

SEQ ID NO: 1799 - protein, 9 aa, synthetic construct
  REGION 1..9: note = Synthetic
GSTNTFNKM

SEQ ID NO: 1800 - protein, 9 aa, synthetic construct
  REGION 1..9: note = Synthetic
GRAIGELSM

SEQ ID NO: 1801 - protein, 8 aa, synthetic construct
  REGION 1..8: note = Synthetic
ISGSGAST

SEQ ID NO: 1802 - protein, 7 aa, synthetic construct
  REGION 1..7: note = Synthetic
SWSASST

SEQ ID NO: 1803 - protein, 8 aa, synthetic construct
  REGION 1..8: note = Synthetic
ISKDGRST

SEQ ID NO: 1804 - protein, 6 aa, synthetic construct
  REGION 1..6: note = Synthetic
MSRGDP

SEQ ID NO: 1805 - protein, 7 aa, synthetic construct
  REGION 1..7: note = Synthetic
AIWSGGT

SEQ ID NO: 1806 - protein, 22 aa, synthetic construct
  REGION 1..22: note = Synthetic
AVYSAPDPTFDHYHMYSANYDN

SEQ ID NO: 1807 - protein, 22 aa, synthetic construct
  REGION 1..22: note = Synthetic
ASMRASYCAGYRCHQRAQTYDY

SEQ ID NO: 1808 - protein, 18 aa, synthetic construct
  REGION 1..18: note = Synthetic
ASDYNGGGIPSLRLDYNY

SEQ ID NO: 1809 - protein, 9 aa, synthetic construct
  REGION 1..9: note = Synthetic
RGRIGERVY

SEQ ID NO: 1810 - protein, 6 aa, synthetic construct
  REGION 1..6: note = Synthetic
NVGANY
